(19) United States
(12) Patent Application Publication
(10) Pub. No.: US 2026/0028627 A1
(43) Pub. Date: Jan. 29, 2026

(54) ARTIFICIAL NUCLEIC ACID MOLECULES FOR IMPROVED PROTEIN OR PEPTIDE EXPRESSION

(71) Applicant: CureVac SE, Tübingen (DE)

(72) Inventor: Andreas THESS, Tübingen (DE)

(73) Assignee: CureVac SE, Tübingen (DE)

(21) Appl. No.: 19/356,749

(22) Filed: Oct. 13, 2025

Related U.S. Application Data
(63) Continuation of application No. 16/920,701, filed on Jul. 4, 2020, now Pat. No. 12,460,204.
Application No. 16/920,701 is a continuation of application No. 15/590,370, filed on May 9, 2017, now Pat. No. 10,738,306.
Application No. 15/590,370 is a continuation of application No. 14/388,226, now Pat. No. 9,683,233.

(30) Foreign Application Priority Data
Mar. 27, 2012 (WO) PCT/EP2012/001336
Jun. 8, 2012 (WO) PCT/EP2012/002447

(51) Int. Cl. C12N 15/113; A61K 39/00; A61K 48/00; C12N 15/67; C12N 15/85

(52) U.S. Cl. CPC C12N 15/113; A61K 39/00; A61K 48/0008; C12N 15/67; C12N 15/85; A61K 2039/5156; A61K 2039/5256; A61K 2039/53; A61K 48/00; C12N 2310/531; C12N 2320/52; C12N 2840/105

(57) ABSTRACT

The invention relates to an artificial nucleic acid molecule comprising at least one 5′UTR element which is derived from a TOP gene, at least one open reading frame, and preferably at least one histone stem-loop. Optionally the artificial nucleic acid molecule may further comprise, e.g. a poly(A)sequence, a poyladenylation signal, and/or a 3′UTR. The invention further relates to the use of such an artificial nucleic acid molecule in gene therapy and/or genetic vaccination.

[0001] This application is a continuation of U.S. application Ser. No. 16/920,701, filed Jul. 4, 2020, which is a continuation of U.S. application Ser. No. 15/590,370, filed May 9, 2017, now U.S. Pat. No. 10,738,306, which is a continuation of U.S. application Ser. No. 14/388,226, filed Sep. 25, 2014, now U.S. Pat. No. 9,683,233, which is a national phase application under 35 U.S.C. § 371 of International Application No. PCT/EP2013/000937, filed Mar. 27, 2013, which claims priority to International Application No. PCT/EP2012/001336, filed Mar. 27, 2012, and International Application No. PCT/EP2012/002447, filed Jun. 8, 2012. The entire text of each of the above referenced disclosures is specifically incorporated herein by reference.

[0002] This application contains a Sequence Listing XML, which has been submitted electronically and is hereby incorporated by reference in its entirety. Said Sequence Listing XML, created on Oct. 9, 2025, is named CRVCP0132USC3.xml and is 1,652,081 bytes in size.

[0003] The invention relates to artificial nucleic acid molecules comprising a 5′UTR element derived from the 5′UTR of a TOP gene, an open reading frame, and optionally a histone stem-loop, a 3′UTR element, a poly(A) sequence and/or a polyadenylation signal. The invention relates further to a vector comprising a 5′UTR element derived from the 5′UTR of a TOP gene, to a pharmaceutical composition comprising the artificial nucleic acid molecule or the vector, and to a kit comprising the artificial nucleic acid molecule, the vector and/or the pharmaceutical composition, preferably for use in the field of gene therapy and/or genetic vaccination.

[0004] Gene therapy and genetic vaccination belong to the most promising and quickly developing methods of modern medicine. They may provide highly specific and individual options for therapy of a large variety of diseases. Particularly, inherited genetic diseases but also autoimmune diseases, cancerous or tumour-related diseases as well as inflammatory diseases may be the subject of such treatment approaches. Also, it is envisaged to prevent (early) onset of such diseases by these approaches.

[0005] The main conceptual rational behind gene therapy is appropriate modulation of impaired gene expression associated with pathological conditions of specific diseases. Pathologically altered gene expression may result in lack or overproduction of essential gene products, for example, signalling factors such as hormones, housekeeping factors, metabolic enzymes, structural proteins or the like. Altered gene expression may not only be due to mis-regulation of transcription and/or translation, but also due to mutations within the ORF coding for a particular protein. Pathological mutations may be caused by e.g. chromosomal aberration, or by more specific mutations, such as point or frame-shift-mutations, all of them resulting in limited functionality and, potentially, total loss of function of the gene product. However, misregulation of transcription or translation may also occur, if mutations affect genes encoding proteins which are involved in the transcriptional or translational machinery of the cell. Such mutations may lead to pathological up- or down-regulation of genes which are—as such—functional. Genes encoding gene products which exert such regulating functions, may be, e.g., transcription factors, signal receptors, messenger proteins or the like. However, loss of function of such genes encoding regulatory proteins may, under certain circumstances, be reversed by artificial introduction of other factors acting further downstream of the impaired gene product. Such gene defects may also be compensated by gene therapy via substitution of the affected gene itself.

[0006] Genetic vaccination allows to evoke a desired immune response to selected antigens, such as characteristic components of bacterial surfaces, viral particles, tumour antigens or the like. Generally, vaccination is one of the pivotal achievements of modern medicine. However, effective vaccines are currently available only for a smaller number of diseases. Accordingly, infections that are not preventable by vaccination still affect millions of people every year.

[0007] Commonly, vaccines may be subdivided into “first”, “second” and “third” generation vaccines. “First generation” vaccines are, typically, whole-organism vaccines. They are based on either live and attenuated or killed pathogens, e.g. viruses, bacteria or the like. The major drawback of live and attenuated vaccines is the risk for a reversion to life-threatening variants. Thus, although attenuated, such pathogens may still intrinsically bear unpredictable risks. Killed pathogens may not be as effective as desired for generating a specific immune response. In order to minimize these risks, “second generation” vaccines were developed. These are, typically, subunit vaccines, consisting of defined antigens or recombinant protein components which are derived from pathogens.

[0008] Genetic vaccines, i.e. vaccines for genetic vaccination, are usually understood as “third generation” vaccines. They are typically composed of genetically engineered nucleic acid molecules which allow expression of peptide or protein (antigen) fragments characteristic for a pathogen or a tumor antigen in vivo. Genetic vaccines are expressed upon administration to a patient and uptake by competent cells. Expression of the administered nucleic acids results in production of the encoded proteins. In the event these proteins are recognized as foreign by the patient's immune system, an immune response is triggered.

[0009] As can be seen from the above, both methods, gene therapy and genetic vaccination, are essentially based on the administration of nucleic acid molecules to a patient and subsequent transcription and/or translation of the encoded genetic information. Alternatively, genetic vaccination or gene therapy may also comprise methods which include isolation of specific body cells from a patient to be treated, subsequent in vitro transfection of such cells, and re-administration of the treated cells to the patient.

[0010] DNA as well as RNA may be used as nucleic acid molecules for administration in the context of gene therapy or genetic vaccination. DNA is known to be relatively stable and easy to handle. However, the use of DNA bears the risk of undesired insertion of the administered DNA-fragments into the patient's genome potentially resulting in loss of function of the impaired genes. As a further risk, the undesired generation of anti-DNA antibodies has emerged. Another drawback is the limited expression level of the encoded peptide or protein that is achievable upon DNA administration and its transcription/translation. Among other reasons, the expression level of the administered DNA will be dependent on the presence of specific transcription factors which regulate DNA transcription. In the absence of such factors, DNA transcription will not yield satisfying amounts of RNA. As a result, the level of translated peptide or protein obtained is limited.

[0011] By using RNA instead of DNA for gene therapy or genetic vaccination, the risk of undesired genomic integration and generation of anti-DNA antibodies is minimized or avoided. However, RNA is considered to be a rather unstable molecular species which may readily be degraded by ubiquitous RNAses.

[0012] In vivo, RNA-degradation contributes to the regulation of the RNA half-life time. That effect was considered and proven to fine tune the regulation of eukaryotic gene expression (Friedel et al., Conserved principles of mammalian transcriptional regulation revealed by RNA half-life, Nucleic Acid Research, 2009, 1-12). Accordingly, each naturally occurring mRNA has its individual half-life depending on the gene from which the mRNA is derived. It contributes to the regulation of the expression level of this gene. Unstable RNAs are important to realize transient gene expression at distinct points in time. However, long-lived RNAs may be associated with accumulation of distinct proteins or continuous expression of genes. In vivo, the half life of mRNAs may also be dependent on environmental factors, such as hormonal treatment, as has been shown, e.g., for insulin-like growth factor I, actin, and albumin mRNA (Johnson et al., Newly synthesized RNA: Simultaneous measurement in intact cells of transcription rates and RNA stability of insulin-like growth factor I, actin, and albumin in growth hormone-stimulated hepatocytes, Proc. Natl. Acad. Sci., Vol. 88, pp. 5287-5291, 1991).

[0013] For gene therapy and genetic vaccination, usually stable RNA is desired. This is, on the one hand, due to the fact that the product encoded by the RNA-sequence shall accumulate in vivo. On the other hand, the RNA has to maintain its structural and functional integrity when prepared for a suitable dosage form, in the course of its storage, and when administered. Thus, considerable attention was dedicated to provide stable RNA molecules for gene therapy or genetic vaccination in order to prevent them from being subject to early degradation or decay.

[0014] It has been reported that the G/C-content of nucleic acid molecules may influence their stability. Thus, nucleic acids comprising an increased amount of guanine (G) and/or cytosine (C) residues may be functionally more stable than nucleic acids containing a large amount of adenine (A) and thymine (T) or uracil (U) nucleotides. In this context, WO02/098443 provides a pharmaceutical composition containing an mRNA that is stabilised by sequence modifications in the translated region. Such a sequence modification takes advantage of the degeneracy of the genetic code. Accordingly, codons which contain a less favourable combination of nucleotides (less favourable in terms of RNA stability) may be substituted by alternative codons without altering the encoded amino acid sequence. This method of RNA stabilization is limited by the provisions of the specific nucleotide sequence of each single RNA molecule which is not allowed to leave the space of the desired amino acid sequence. Also, that approach is restricted to coding regions of the RNA.

[0015] As an alternative option for mRNA stabilisation, it has been found that naturally occurring eukaryotic mRNA molecules contain characteristic stabilising elements. For example, they may comprise so-called untranslated regions (UTR) at their 5′-end (5′UTR) and/or at their 3′-end (3′UTR) as well as other structural features, such as a 5′-cap structure or a 3′-poly(A) tail. Both, 5′UTR and 3′UTR are typically transcribed from the genomic DNA and are, thus, an element of the premature mRNA. Characteristic structural features of mature mRNA, such as the 5′-cap and the 3′-poly(A) tail (also called poly(A) tail or poly(A) sequence) are usually added to the transcribed (premature) mRNA during mRNA processing.

[0016] A 3′-poly(A) tail is typically a monotonous sequence stretch of adenine nucleotides added to the 3′-end of the transcribed mRNA. It may comprise up to about 400 adenine nucleotides. It was found that the length of such a 3′-poly(A) tail is a potentially critical element for the stability of the individual mRNA.

[0017] Nearly all eukaryotic mRNAs end with such a poly(A) sequence that is added to their 3′ end by the ubiquitous cleavage/polyadenylation machinery. The presence of a poly(A) sequence at the 3′ end is one of the most recognizable features of eukaryotic mRNAs. After cleavage, most pre-mRNAs, with the exception of replication-dependent histone transcripts, acquire a polyadenylated tail. In this context, 3′ end processing is a nuclear co-transcriptional process that promotes transport of mRNAs from the nucleus to the cytoplasm and affects the stability and the translation of mRNAs. Formation of this 3′ end occurs in a two step reaction directed by the cleav-age/polyadenylation machinery and depends on the presence of two sequence elements in mRNA precursors (pre-mRNAs); a highly conserved hexanucleotide AAUAAA (polyadenylation signal) and a downstream G/U-rich sequence. In a first step, pre-mRNAs are cleaved between these two elements. In a second step tightly coupled to the first step the newly formed 3′ end is extended by addition of a poly(A) sequence consisting of 200-250 adenylates which affects subsequently all aspects of mRNA metabolism, including mRNA export, stability and translation (Dominski, Z. and W. F. Marzluff (2007), Gene 396(2): 373-90.).

[0018] The only known exception to this rule are the replication-dependent histone mRNAs which terminate with a histone stem-loop instead of a poly(A) sequence. Exemplary histone stem-loop sequences are described in Lopez et al. (Dávila López, M., & Samuelsson, T. (2008), RNA (New York, N.Y.), 14(1), 1-10. doi:10.1261/rna.782308.).

[0019] The stem-loops in histone pre-mRNAs are typically followed by a purine-rich sequence known as the histone downstream element (HDE). These pre-mRNAs are processed in the nucleus by a single endonucleolytic cleavage approximately 5 nucleotides downstream of the stem-loop, catalyzed by the U7 snRNP through base pairing of the U7 snRNA with the HDE.

[0020] Due to the requirement to package newly synthesized DNA into chromatin, histone synthesis is regulated in concert with the cell cycle. Increased synthesis of histone proteins during S phase is achieved by transcriptional activation of histone genes as well as posttranscriptional regulation of histone mRNA levels. It could be shown that the histone stem-loop is essential for all posttranscriptional steps of histone expression regulation. It is necessary for efficient processing, export of the mRNA into the cytoplasm, loading onto polyribosomes, and regulation of mRNA stability.

[0021] In the above context, a 32 kDa protein was identified, which is associated with the histone stem-loop at the 3′-end of the histone messages in both the nucleus and the cytoplasm. The expression level of this stem-loop binding protein (SLBP) is cell-cycle regulated and is highest during S-phase when histone mRNA levels are increased. SLBP is necessary for efficient 3′-end processing of histone pre-mRNA by the U7 snRNP. After completion of processing, SLBP remains associated with the stem-loop at the end of mature histone mRNAs and stimulates their translation into histone proteins in the cytoplasm. (Dominski, Z. and W. F. Marzluff (2007), Gene 396(2): 373-90). Interestingly, the RNA binding domain of SLBP is conserved throughout metazoa and protozoa (Dávila López, M., & Samuelsson, T. (2008), RNA (New York, N.Y.), 14(1), 1-10. doi:10.1261/rna.782308) and it could be shown that its binding to the histone stem-loop sequence is dependent on the stem-loop structure and that the minimum binding site contains at least 3 nucleotides 5′ and 2 nucleotides 3′ of the stem-loop (Pandey, N. B., et al. (1994), Molecular and Cellular Biology, 14(3), 1709-1720 and Williams, A. S., & Marzluff, W. F., (1995), Nucleic Acids Research, 23(4), 654-662.).

[0022] Even though histone genes are generally classified as either “replication-dependent”, giving rise to mRNA ending in a histone stem-loop, or “replacement-type”, giving rise to mRNA bearing a poly(A)-tail instead, naturally occurring mRNAs containing both a histone stem-loop and poly(A) or oligo(A) 3′ thereof have been identified in some very rare cases. Sanchez et al. examined the effect of naturally occurring oligo(A) tails appended 3′ of the histone stem-loop of histone mRNA during Xenopus oogenesis using Luciferase as a reporter protein and found that the oligo(A) tail is an active part of the translation repression mechanism that silences histone mRNA during oogenesis and its removal is part of the mechanism that activates translation of histone mRNAs (Sanchez, R. and W. F. Marzluff (2004), Mol Cell Biol 24(6): 2513-25).

[0023] Furthermore, the requirements for regulation of replication dependent histones at the level of pre-mRNA processing and mRNA stability have been investigated using artificial constructs coding for the marker protein alpha globin, taking advantage of the fact that the globin gene contains introns as opposed to the intron-less histone genes. For this purpose constructs were generated in which the alpha globin coding sequence was followed by a histone stem-loop signal (histone stem-loop followed by the histone downstream element) and a polyadenylation signal (Whitelaw, E., et al. (1986). Nucleic Acids Research, 14(17), 7059-7070; Pandey, N. B., & Marzluff, W. F. (1987). Molecular and Cellular Biology, 7(12), 4557-4559; Pandey, N. B., et al. (1990). Nucleic Acids Research, 18(11), 3161-3170).

[0024] Also, it was shown that the 3′UTR of α-globin mRNA may be an important factor for the well-known stability of α-globin mRNA (Rodgers et al., Regulated α-globin mRNA decay is a cytoplasmic event proceeding through 3′-to-5′ exosome-dependent decapping, RNA, 8, pp. 1526-1537, 2002). The 3′UTR of α-globin mRNA is obviously involved in the formation of a specific ribonucleoprotein-complex, the α-complex, whose presence correlates with mRNA stability in vitro (Wang et al., An mRNA stability complex functions with poly(A)-binding protein to stabilize mRNA in vitro, Molecular and Cellular biology, Vol 19, No. 7, July 1999, p. 4552-4560).

[0025] Irrespective of factors influencing mRNA stability, effective translation of the administered nucleic acid molecules by the target cells or tissue is crucial for any approach using nucleic acid molecules for gene therapy or genetic vaccination. Along with the regulation of stability, also translation of the majority of mRNAs is regulated by structural features like UTRs, 5′-cap and 3′-poly(A) tail. In this context, it has been reported that the length of the poly(A) tail may play an important role for translational efficiency as well. Stabilizing 3′-elements, however, may also have an attenuating effect on translation.

[0026] Further regulative elements, which may have an influence on expression levels, may be found in the 5′UTR. For example, it has been reported that synthesis of particular proteins, e.g. proteins belonging to the translational apparatus, may be regulated not only at the transcriptional but also at the translational level. For example, translation of proteins encoded by so called ‘TOP-genes’ may be down-regulated by translational repression. Therein, the term ‘TOP-gene’ relates to a gene corresponding to an mRNA that is characterized by the presence of a TOP sequence at the 5′end and in most cases by a growth-associated translation regulation (Iadevaia et al., All translation elongation factors and the e, f, and h subunits of translation initiation factor 3 are encoded by 5′-terminal oligopyrimidine (TOP) mRNAs; RNA, 2008, 14:1730-1736). In this context, a TOP sequence—also called the ‘5′-terminal oligopyrimidine tract’—typically consists of a C residue at the cap site, followed by an uninterrupted sequence of up to 13 or even more pyrimidines (Avni et al., Vertebrate mRNAs with a 5′-terminal pyrimidine tract are Candidates for translational repression in quiescent cells: characterization of the translational cis-regulatory element, Molecular and Cellular Biology, 1994, p. 3822-3833). These TOP sequences are reported to be present in many mRNAs encoding components of the translational machinery and to be responsible for selective repression of the translation of these TOP containing mRNAs due to growth arrest (Meyuhas, et al., Translational Control of Ribosomal Protein mRNAs in Eukaryotes, Translational Control. Cold Spring Harbor Monograph Archive. Cold Spring Harbor Laboratory Press, 1996, p. 363-388).

[0027] It is the object of the invention to provide nucleic acid molecules which may be suitable for application in gene therapy and/or genetic vaccination. Particularly, it is the object of the invention to provide artificial nucleic acid molecules, such as an mRNA species, which provide for increased protein production from said artificial nucleic acid molecules, preferably which exhibit increased translational efficiency. Another object of the present invention is to provide nucleic acid molecules coding for such a superior mRNA species which may be amenable for use in gene therapy and/or genetic vaccination. It is a further object of the present invention to provide a pharmaceutical composition for use in gene therapy and/or genetic vaccination. In summary, it is the object of the present invention to provide improved nucleic acid species which overcome the above discussed disadvantages of the prior art by a cost-effective and straight-forward approach.

[0028] The object underlying the present invention is solved by the claimed subject-matter. For the sake of clarity and readability the following definitions are provided. Any technical feature mentioned for these definitions may be read on each and every embodiment of the invention. Additional definitions and explanations may be specifically provided in the context of these embodiments.

[0029] Adaptive immune response: The adaptive immune response is typically understood to be an antigen-specific response of the immune system. Antigen specificity allows for the generation of responses that are tailored to specific pathogens or pathogen-infected cells. The ability to mount these tailored responses is usually maintained in the body by “memory cells”. Should a pathogen infect the body more than once, these specific memory cells are used to quickly eliminate it. In this context, the first step of an adaptive immune response is the activation of naïve antigen-specific T cells or different immune cells able to induce an antigen-specific immune response by antigen-presenting cells. This occurs in the lymphoid tissues and organs through which naïve T cells are constantly passing. The three cell types that may serve as antigen-presenting cells are dendritic cells, macrophages, and B cells. Each of these cells has a distinct function in eliciting immune responses. Dendritic cells may take up antigens by phagocytosis and macropinocytosis and may become stimulated by contact with e.g. a foreign antigen to migrate to the local lymphoid tissue, where they differentiate into mature dendritic cells. Macrophages ingest particulate antigens such as bacteria and are induced by infectious agents or other appropriate stimuli to express MHC molecules. The unique ability of B cells to bind and internalize soluble protein antigens via their receptors may also be important to induce T cells. MHC-molecules are, typically, responsible for presentation of an antigen to T-cells. Therein, presenting the antigen on MHC molecules leads to activation of T cells which induces their proliferation and differentiation into armed effector T cells. The most important function of effector T cells is the killing of infected cells by CD8+ cytotoxic T cells and the activation of macrophages by Th1 cells which together make up cell-mediated immunity, and the activation of B cells by both Th2 and Th1 cells to produce different classes of antibody, thus driving the humoral immune response. T cells recognize an antigen by their T cell receptors which do not recognize and bind the antigen directly, but instead recognize short peptide fragments e.g. of pathogen-derived protein antigens, e.g. so-called epitopes, which are bound to MHC molecules on the surfaces of other cells.

[0030] Adaptive immune system: The adaptive immune system is essentially dedicated to eliminate or prevent pathogenic growth. It typically regulates the adaptive immune response by providing the vertebrate immune system with the ability to recognize and remember specific pathogens (to generate immunity), and to mount stronger attacks each time the pathogen is encountered. The system is highly adaptable because of somatic hypermutation (a process of accelerated somatic mutations), and V(D)J recombination (an irreversible genetic recombination of antigen receptor gene segments). This mechanism allows a small number of genes to generate a vast number of different antigen receptors, which are then uniquely expressed on each individual lymphocyte. Because the gene rearrangement leads to an irreversible change in the DNA of each cell, all of the progeny (offspring) of such a cell will then inherit genes encoding the same receptor specificity, including the Memory B cells and Memory T cells that are the keys to long-lived specific immunity.

[0031] Adjuvant/adjuvant component: An adjuvant or an adjuvant component in the broadest sense is typically a pharmacological and/or immunological agent that may modify, e.g. enhance, the effect of other agents, such as a drug or vaccine. It is to be interpreted in a broad sense and refers to a broad spectrum of substances. Typically, these substances are able to increase the immunogenicity of antigens. For example, adjuvants may be recognized by the innate immune systems and, e.g., may elicit an innate immune response. “Adjuvants” typically do not elicit an adaptive immune response. Insofar, “adjuvants” do not qualify as antigens. Their mode of action is distinct from the effects triggered by antigens resulting in an adaptive immune response.

[0032] Antigen: In the context of the present invention “antigen” refers typically to a substance which may be recognized by the immune system, preferably by the adaptive immune system, and is capable of triggering an antigen-specific immune response, e.g. by formation of antibodies and/or antigen-specific T cells as part of an adaptive immune response. Typically, an antigen may be or may comprise a peptide or protein which may be presented by the MHC to T-cells.

[0033] Artificial nucleic acid molecule: An artificial nucleic acid molecule may typically be understood to be a nucleic acid molecule, e.g. a DNA or an RNA, that does not occur naturally. In other words, an artificial nucleic acid molecule may be understood as a non-natural nucleic acid molecule. Such nucleic acid molecule may be non-natural due to its individual sequence (which does not occur naturally) and/or due to other modifications, e.g. structural modifications of nucleotides which do not occur naturally. An artificial nucleic acid molecule may be a DNA molecule, an RNA molecule or a hybrid-molecule comprising DNA and RNA portions. Typically, artificial nucleic acid molecules may be designed and/or generated by genetic engineering methods to correspond to a desired artificial sequence of nucleotides (heterologous sequence). In this context an artificial sequence is usually a sequence that may not occur naturally, i.e. it differs from the wild type sequence by at least one nucleotide. The term ‘wild type’ may be understood as a sequence occurring in nature. Further, the term ‘artificial nucleic acid molecule’ is not restricted to mean ‘one single molecule’ but is, typically, understood to comprise an ensemble of identical molecules. Accordingly, it may relate to a plurality of identical molecules contained in an aliquot.

[0034] Bicistronic RNA, multicistronic RNA: A bicistronic or multicistronic RNA is typically an RNA, preferably an mRNA, that typically may have two (bicistronic) or more (multicistronic) open reading frames (ORF). An open reading frame in this context is a sequence of codons that is translatable into a peptide or protein.

[0035] Carrier/polymeric carrier: A carrier in the context of the invention may typically be a compound that facilitates transport and/or complexation of another compound (cargo). A polymeric carrier is typically a carrier that is formed of a polymer. A carrier may be associated to its cargo by covalent or non-covalent interaction. A carrier may transport nucleic acids, e.g. RNA or DNA, to the target cells. The carrier may—for some embodiments—be a cationic component.

[0036] Cationic component: The term “cationic component” typically refers to a charged molecule, which is positively charged (cation) at a pH value typically from 1 to 9, preferably at a pH value of or below 9 (e.g. from 5 to 9), of or below 8 (e.g. from 5 to 8), of or below 7 (e.g. from 5 to 7), most preferably at a physiological pH, e.g. from 7.3 to 7.4. Accordingly, a cationic component may be any positively charged compound or polymer, preferably a cationic peptide or protein which is positively charged under physiological conditions, particularly under physiological conditions in vivo. A ‘cationic peptide or protein’ may contain at least one positively charged amino acid, or more than one positively charged amino acid, e.g. selected from Arg, His, Lys or Orn. Accordingly, ‘polycationic’ components are also within the scope exhibiting more than one positive charge under the conditions given.

[0037] 5′-cap: A 5′-cap is an entity, typically a modified nucleotide entity, which generally ‘caps’ the 5′-end of a mature mRNA. A 5′-cap may typically be formed by a modified nucleotide, particularly by a derivative of a guanine nucleotide. Preferably, the 5′-cap is linked to the 5′-terminus via a 5′-5′-triphosphate linkage. A 5′-cap may be methylated, e.g. m7GpppN, wherein N is the terminal 5′ nucleotide of the nucleic acid carrying the 5′-cap, typically the 5′-end of an RNA. Further examples of 5′cap structures include glyceryl, inverted deoxy abasic residue (moiety), 4′,5′ methylene nucleotide, 1(beta-D-erythrofuranosyl) nucleotide, 4′-thio nucleotide, carbocyclic nucleotide, 1,5-anhydrohexitol nucleotide, L-nucleotides, alpha-nucleotide, modified base nucleotide, threo-pentofuranosyl nucleotide, acyclic 3′,4′-seco nucleotide, acyclic 3,4-dihydroxybutyl nucleotide, acyclic 3,5 dihydroxypentyl nucleotide, 3′-3′-inverted nucleotide moiety, 3′-3′-inverted abasic moiety, 3′-2′-inverted nucleotide moiety, 3′-2′-inverted abasic moiety, 1,4-butanediol phosphate, 3′-phosphoramidate, hexylphosphate, aminohexyl phosphate, 3′-phosphate, 3′phosphorothioate, phosphorodithioate, or bridging or non-bridging methylphosphonate moiety.

[0038] Cellular immunity/cellular immune response: Cellular immunity relates typically to the activation of macrophages, natural killer cells (NK), antigen-specific cytotoxic T-lymphocytes, and the release of various cytokines in response to an antigen. In more general terms, cellular immunity is not based on antibodies, but on the activation of cells of the immune system. Typically, a cellular immune response may be characterized e.g. by activating antigen-specific cytotoxic T-lymphocytes that are able to induce apoptosis in cells, e.g. specific immune cells like dendritic cells or other cells, displaying epitopes of foreign antigens on their surface. Such cells may be virus-infected or infected with intracellular bacteria, or cancer cells displaying tumor antigens. Further characteristics may be activation of macrophages and natural killer cells, enabling them to destroy pathogens and stimulation of cells to secrete a variety of cytokines that influence the function of other cells involved in adaptive immune responses and innate immune responses.

[0039] DNA: DNA is the usual abbreviation for deoxy-ribonucleic-acid. It is a nucleic acid molecule, i.e. a polymer consisting of nucleotides. These nucleotides are usually deoxy-adenosine-monophosphate, deoxy-thymidine-monophosphate, deoxy-guanosine-monophosphate and deoxy-cytidine-monophosphate monomers which are—by themselves—composed of a sugar moiety (deoxyribose), a base moiety and a phosphate moiety, and polymerise by a characteristic backbone structure. The backbone structure is, typically, formed by phosphodiester bonds between the sugar moiety of the nucleotide, i.e. deoxyribose, of a first and a phosphate moiety of a second, adjacent monomer. The specific order of the monomers, i.e. the order of the bases linked to the sugar/phosphate-backbone, is called the DNA-sequence. DNA may be single stranded or double stranded. In the double stranded form, the nucleotides of the first strand typically hybridize with the nucleotides of the second strand, e.g. by A/T-base-pairing and G/C-base-pairing.

[0040] Epitope: Epitopes (also called ‘antigen determinant’) can be distinguished in T cell epitopes and B cell epitopes. T cell epitopes or parts of the proteins in the context of the present invention may comprise fragments preferably having a length of about 6 to about 20 or even more amino acids, e.g. fragments as processed and presented by MHC class I molecules, preferably having a length of about 8 to about 10 amino acids, e.g. 8, 9, or 10, (or even 11, or 12 amino acids), or fragments as processed and presented by MHC class II molecules, preferably having a length of about 13 or more amino acids, e.g. 13, 14, 15, 16, 17, 18, 19, 20 or even more amino acids, wherein these fragments may be selected from any part of the amino acid sequence. These fragments are typically recognized by T cells in form of a complex consisting of the peptide fragment and an MHC molecule, i.e. the fragments are typically not recognized in their native form. B cell epitopes are typically fragments located on the outer surface of (native) protein or peptide antigens as defined herein, preferably having 5 to 15 amino acids, more preferably having 5 to 12 amino acids, even more preferably having 6 to 9 amino acids, which may be recognized by antibodies, i.e. in their native form.

[0041] Such epitopes of proteins or peptides may furthermore be selected from any of the herein mentioned variants of such proteins or peptides. In this context antigenic determinants can be con-formational or discontinuous epitopes which are composed of segments of the proteins or peptides as defined herein that are discontinuous in the amino acid sequence of the proteins or peptides as defined herein but are brought together in the three-dimensional structure or continuous or linear epitopes which are composed of a single polypeptide chain.

[0042] Fragment of a sequence: A fragment of a sequence may typically be a shorter portion of a full-length sequence of e.g. a nucleic acid molecule or an amino acid sequence. Accordingly, a fragment, typically, consists of a sequence that is identical to the corresponding stretch within the full-length sequence. A preferred fragment of a sequence in the context of the present invention, consists of a continuous stretch of entities, such as nucleotides or amino acids corresponding to a continuous stretch of entities in the molecule the fragment is derived from, which represents at least 20%, preferably at least 30%, more preferably at least 40%, more preferably at least 50%, even more preferably at least 60%, even more preferably at least 70%, and most preferably at least 80% of the total (i.e. full-length) molecule from which the fragment is derived.

[0043] G/C modified: A G/C-modified nucleic acid may typically be a nucleic acid, preferably an artificial nucleic acid molecule as defined herein, based on a modified wild-type sequence comprising a preferably increased number of guanosine and/or cytosine nucleotides as compared to the wild-type sequence. Such an increased number may be generated by substitution of codons containing adenosine or thymidine nucleotides by codons containing guanosine or cytosine nucleotides. If the enriched G/C content occurs in a coding region of DNA or RNA, it makes use of the degeneracy of the genetic code. Accordingly, the codon substitutions preferably do not alter the encoded amino acid residues, but exclusively increase the G/C content of the nucleic acid molecule.

[0044] Gene therapy: Gene therapy may typically be understood to mean a treatment of a patient's body or isolated elements of a patient's body, for example isolated tissues/cells, by nucleic acids encoding a peptide or protein. It typically may comprise at least one of the steps of a) administration of a nucleic acid, preferably an artificial nucleic acid molecule as defined herein, directly to the patient—by whatever administration route—or in vitro to isolated cells/tissues of the patient, which results in transfection of the patient's cells either in vivo/ex vivo or in vitro; b) transcription and/or translation of the introduced nucleic acid molecule; and optionally c) re-administration of isolated, transfected cells to the patient, if the nucleic acid has not been administered directly to the patient.

[0045] Genetic vaccination: Genetic vaccination may typically be understood to be vaccination by administration of a nucleic acid molecule encoding an antigen or an immunogen or fragments thereof. The nucleic acid molecule may be administered to a subject's body or to isolated cells of a subject. Upon transfection of certain cells of the body or upon transfection of the isolated cells, the antigen or immunogen may be expressed by those cells and subsequently presented to the immune system, eliciting an adaptive, i.e. antigen-specific immune response. Accordingly, genetic vaccination typically comprises at least one of the steps of a) administration of a nucleic acid, preferably an artificial nucleic acid molecule as defined herein, to a subject, preferably a patient, or to isolated cells of a subject, preferably a patient, which usually results in transfection of the subject's cells either in vivo or in vitro; b) transcription and/or translation of the introduced nucleic acid molecule; and optionally c) re-administration of isolated, transfected cells to the subject, preferably the patient, if the nucleic acid has not been administered directly to the patient.

[0046] Heterologous sequence: Two sequences are typically understood to be ‘heterologous’ if they are not derivable from the same gene. I.e., although heterologous sequences may be derivable from the same organism, they naturally (in nature) do not occur in the same nucleic acid molecule, such as in the same mRNA.

[0047] Humoral immunity/humoral immune response: Humoral immunity refers typically to antibody production and optionally to accessory processes accompanying antibody production. A humoral immune response may be typically characterized, e.g., by Th2 activation and cytokine production, germinal center formation and isotype switching, affinity maturation and memory cell generation. Humoral immunity also typically may refer to the effector functions of antibodies, which include pathogen and toxin neutralization, classical complement activation, and opsonin promotion of phagocytosis and pathogen elimination.

[0048] Immunogen: In the context of the present invention an immunogen may be typically understood to be a compound that is able to stimulate an immune response. Preferably, an immunogen is a peptide, polypeptide, or protein. In a particularly preferred embodiment, an immunogen in the sense of the present invention is the product of translation of a provided nucleic acid molecule, preferably an artificial nucleic acid molecule as defined herein. Typically, an immunogen elicits at least an adaptive immune response.

[0049] Immunostimulatory composition: In the context of the invention, an immunostimulatory composition may be typically understood to be a composition containing at least one component which is able to induce an immune response or from which a component which is able to induce an immune response is derivable. Such immune response may be preferably an innate immune response or a combination of an adaptive and an innate immune response. Preferably, an immunostimulatory composition in the context of the invention contains at least one artificial nucleic acid molecule, more preferably an RNA, for example an mRNA molecule. The immunostimulatory component, such as the mRNA may be complexed with a suitable carrier. Thus, the immunostimulatory composition may comprise an mRNA/carrier-complex. Furthermore, the immunostimulatory composition may comprise an adjuvant and/or a suitable vehicle for the immunostimulatory component, such as the mRNA.

[0050] Immune response: An immune response may typically be a specific reaction of the adaptive immune system to a particular antigen (so called specific or adaptive immune response) or an unspecific reaction of the innate immune system (so called unspecific or innate immune response), or a combination thereof.

[0051] Immune system: The immune system may protect organisms from infection. If a pathogen succeeds in passing a physical barrier of an organism and enters this organism, the innate immune system provides an immediate, but non-specific response. If pathogens evade this innate response, vertebrates possess a second layer of protection, the adaptive immune system. Here, the immune system adapts its response during an infection to improve its recognition of the pathogen. This improved response is then retained after the pathogen has been eliminated, in the form of an immunological memory, and allows the adaptive immune system to mount faster and stronger attacks each time this pathogen is encountered. According to this, the immune system comprises the innate and the adaptive immune system. Each of these two parts typically contains so called humoral and cellular components.

[0052] Immunostimulatory RNA: An immunostimulatory RNA (isRNA) in the context of the invention may typically be an RNA that is able to induce an innate immune response. It usually does not have an open reading frame and thus does not provide a peptide-antigen or immunogen but elicits an immune response e.g. by binding to a specific kind of Toll-like-receptor (TLR) or other suitable receptors. However, of course also mRNAs having an open reading frame and coding for a peptide/protein may induce an innate immune response and, thus, may be immunostimulatory RNAs.

[0053] Innate immune system: The innate immune system, also known as non-specific (or unspecific) immune system, typically comprises the cells and mechanisms that defend the host from infection by other organisms in a non-specific manner. This means that the cells of the innate system may recognize and respond to pathogens in a generic way, but unlike the adaptive immune system, it does not confer long-lasting or protective immunity to the host. The innate immune system may be, e.g., activated by ligands of Toll-like receptors (TLRs) or other auxiliary substances such as lipopolysaccharides, TNF-alpha, CD40 ligand, or cytokines, monokines, lymphokines, interleukins or chemokines, IL-1, IL-2, IL-3, IL-4, IL-5, IL-6, IL-7, IL-8, IL-9, IL-10, IL-11, IL-12, IL-13, IL-14, IL-15, IL-16, IL-17, IL-18, IL-19, IL-20, IL-21, IL-22, IL-23, IL-24, IL-25, IL-26, IL-27, IL-28, IL-29, IL-30, IL-31, IL-32, IL-33, IFN-alpha, IFN-beta, IFN-gamma, GM-CSF, G-CSF, M-CSF, LT-beta, TNF-alpha, growth factors, and hGH, a ligand of human Toll-like receptor TLR1, TLR2, TLR3, TLR4, TLR5, TLR6, TLR7, TLR8, TLR9, TLR10, a ligand of murine Toll-like receptor TLR1, TLR2, TLR3, TLR4, TLR5, TLR6, TLR7, TLR8, TLR9, TLR10, TLR11, TLR12 or TLR13, a ligand of a NOD-like receptor, a ligand of a RIG-I like receptor, an immunostimulatory nucleic acid, an immunostimulatory RNA (isRNA), a CpG-DNA, an antibacterial agent, or an anti-viral agent. The pharmaceutical composition according to the present invention may comprise one or more such substances. Typically, a response of the innate immune system includes recruiting immune cells to sites of infection, through the production of chemical factors, including specialized chemical mediators, called cytokines; activation of the complement cascade; identification and removal of foreign substances present in organs, tissues, the blood and lymph, by specialized white blood cells; activation of the adaptive immune system; and/or acting as a physical and chemical barrier to infectious agents.

[0054] Cloning site: A cloning site is typically understood to be a segment of a nucleic acid molecule, which is suitable for insertion of a nucleic acid sequence, e.g., a nucleic acid sequence comprising an open reading frame. Insertion may be performed by any molecular biological method known to the one skilled in the art, e.g. by restriction and ligation. A cloning site typically comprises one or more restriction enzyme recognition sites (restriction sites). These one or more restrictions sites may be recognized by restriction enzymes which cleave the DNA at these sites. A cloning site which comprises more than one restriction site may also be termed a multiple cloning site (MCS) or a polylinker.

[0055] Nucleic acid molecule: A nucleic acid molecule is a molecule comprising, preferably consisting of nucleic acid components. The term nucleic acid molecule preferably refers to DNA or RNA molecules. It is preferably used synonymous with the term “polynucleotide”. Preferably, a nucleic acid molecule is a polymer comprising or consisting of nucleotide monomers which are covalently linked to each other by phosphodiester-bonds of a sugar/phosphate-backbone. The term “nucleic acid molecule” also encompasses modified nucleic acid molecules, such as base-modified, sugar-modified or backbone-modified etc. DNA or RNA molecules.

[0056] Open reading frame: An open reading frame (ORF) in the context of the invention may typically be a sequence of several nucleotide triplets which may be translated into a peptide or protein. An open reading frame preferably contains a start codon, i.e. a combination of three subsequent nucleotides coding usually for the amino acid methionine (ATG or AUG), at its 5′-end and a subsequent region which usually exhibits a length which is a multiple of 3 nucleotides. An ORF is preferably terminated by a stop-codon (e.g., TAA, TAG, TGA). Typically, this is the only stop-codon of the open reading frame. Thus, an open reading frame in the context of the present invention is preferably a nucleotide sequence, consisting of a number of nucleotides that may be divided by three, which starts with a start codon (e.g. ATG or AUG) and which preferably terminates with a stop codon (e.g., TAA, TGA, or TAG or UAA, UAG, UGA, respectively). The open reading frame may be isolated or it may be incorporated in a longer nucleic acid sequence, for example in a vector or an mRNA. An open reading frame may also be termed ‘protein coding region’.

[0057] Peptide: A peptide or polypeptide is typically a polymer of amino acid monomers, linked by peptide bonds. It typically contains less than 50 monomer units. Nevertheless, the term peptide is not a disclaimer for molecules having more than 50 monomer units. Long peptides are also called polypeptides, typically having between 50 and 600 monomeric units.

[0058] Pharmaceutically effective amount: A pharmaceutically effective amount in the context of the invention is typically understood to be an amount that is sufficient to induce a pharmaceutical effect, such as an immune response, altering a pathological level of an expressed peptide or protein, or substituting a lacking gene product, e.g., in case of a pathological situation.

[0059] Protein A protein typically comprises one or more peptides or polypeptides. A protein is typically folded into 3-dimensional form, which may be required for to protein to exert its biological function.

[0060] Poly(A) sequence: A poly(A) sequence, also called poly(A) tail or 3′-poly(A) tail, is typically understood to be a sequence of adenine nucleotides, e.g., of up to about 400 adenine nucleotides, e.g. from about 20 to about 400, preferably from about 50 to about 400, more preferably from about 50 to about 300, even more preferably from about 50 to about 250, most preferably from about 60 to about 250 adenine nucleotides. A poly(A) sequence is typically located at the 3′end of an mRNA. In the context of the present invention, a poly(A) sequence may be located within an mRNA or any other nucleic acid molecule, such as, e.g., in a vector, for example, in a vector serving as template for the generation of an RNA, preferably an mRNA, e.g., by transcription of the vector.

[0061] Polyadenylation: Polyadenylation is typically understood to be the addition of a poly(A) sequence to a nucleic acid molecule, such as an RNA molecule, e.g. to a premature mRNA. Polyadenylation may be induced by a so called polyadenylation signal. This signal is preferably located within a stretch of nucleotides at the 3′-end of a nucleic acid molecule, such as an RNA molecule, to be polyadenylated. A polyadenylation signal typically comprises a hexamer consisting of adenine and uracil/thymine nucleotides, preferably the hexamer sequence AAUAAA. Other sequences, preferably hexamer sequences, are also conceivable. Polyadenylation typically occurs during processing of a pre-mRNA (also called premature-mRNA). Typically, RNA maturation (from pre-mRNA to mature mRNA) comprises the step of polyadenylation.

[0062] Restriction site: A restriction site, also termed ‘restriction enzyme recognition site’, is a nucleotide sequence recognized by a restriction enzyme. A restriction site is typically a short, preferably palindromic nucleotide sequence, e.g. a sequence comprising 4 to 8 nucleotides. A restriction site is preferably specifically recognized by a restriction enzyme. The restriction enzyme typically cleaves a nucleotide sequence comprising a restriction site at this site. In a double-stranded nucleotide sequence, such as a double-stranded DNA sequence, the restriction enzyme typically cuts both strands of the nucleotide sequence.

[0063] RNA, mRNA: RNA is the usual abbreviation for ribonucleic-acid. It is a nucleic acid molecule, i.e. a polymer consisting of nucleotides. These nucleotides are usually adenosine-monophosphate, uridine-monophosphate, guanosine-monophosphate and cytidine-monophosphate monomers which are connected to each other along a so-called backbone. The backbone is formed by phosphodiester bonds between the sugar, i.e. ribose, of a first and a phosphate moiety of a second, adjacent monomer. The specific succession of the monomers is called the RNA-sequence. Usually RNA may be obtainable by transcription of a DNA-sequence, e.g., inside a cell. In eukaryotic cells, transcription is typically performed inside the nucleus or the mitochondria. In vivo, transcription of DNA usually results in the so-called premature RNA which has to be processed into so-called messenger-RNA, usually abbreviated as mRNA. Processing of the premature RNA, e.g. in eukaryotic organisms, comprises a variety of different posttranscriptional-modifications such as splicing, 5′-capping, polyadenylation, export from the nucleus or the mitochondria and the like. The sum of these processes is also called maturation of RNA. The mature messenger RNA usually provides the nucleotide sequence that may be translated into an amino acid sequence of a particular peptide or protein. Typically, a mature mRNA comprises a 5′-cap, a 5′UTR, an open reading frame, a 3′UTR and a poly(A) sequence. Aside from messenger RNA, several non-coding types of RNA exist which may be involved in regulation of transcription and/or translation.

[0064] Sequence of a nucleic acid molecule: The sequence of a nucleic acid molecule is typically understood to be the particular and individual order, i.e. the succession of its nucleotides. The sequence of a protein or peptide is typically understood to be the order, i.e. the succession of its amino acids.

[0065] Sequence identity: Two or more sequences are identical if they exhibit the same length and order of nucleotides or amino acids. The percentage of identity typically describes the extent to which two sequences are identical, i.e. it typically describes the percentage of nucleotides that correspond in their sequence position with identical nucleotides of a reference-sequence. For determination of the degree of identity, the sequences to be compared are considered to exhibit the same length, i.e. the length of the longest sequence of the sequences to be compared. This means that a first sequence consisting of 8 nucleotides is 80% identical to a second sequence consisting of 10 nucleotides comprising the first sequence. In other words, in the context of the present invention, identity of sequences preferably relates to the percentage of nucleotides of a sequence which have the same position in two or more sequences having the same length. Gaps are usually regarded as non-identical positions, irrespective of their actual position in an alignment.

[0066] Stabilized nucleic acid molecule: A stabilized nucleic acid molecule is a nucleic acid molecule, preferably a DNA or RNA molecule that is modified such, that it is more stable to disintegration or degradation, e.g., by environmental factors or enzymatic digest, such as by an exo- or endonuclease degradation, than the nucleic acid molecule without the modification. Preferably, a stabilized nucleic acid molecule in the context of the present invention is stabilized in a cell, such as a prokaryotic or eukaryotic cell, preferably in a mammalian cell, such as a human cell. The stabilization effect may also be exerted outside of cells, e.g. in a buffer solution etc., for example, in a manufacturing process for a pharmaceutical composition comprising the stabilized nucleic acid molecule.

[0067] Transfection: The term ‘transfection’ refers to the introduction of nucleic acid molecules, such as DNA or RNA (e.g. mRNA) molecules, into cells, preferably into eukaryotic cells. In the context of the present invention, the term ‘transfection’ encompasses any method known to the skilled person for introducing nucleic acid molecules into cells, preferably into eukaryotic cells, such as into mammalian cells. Such methods encompass, for example, electroporation, lipofection, e.g. based on cationic lipids and/or liposomes, calcium phosphate precipitation, nanoparticle based transfection, virus based transfection, or transfection based on cationic polymers, such as DEAE-dextran or polyethylenimine etc. Preferably, the introduction is non-viral.

[0068] Vaccine: A vaccine is typically understood to be a prophylactic or therapeutic material providing at least one antigen, preferably an immunogen. The antigen or immunogen may be derived from any material that is suitable for vaccination. For example, the antigen or immunogen may be derived from a pathogen, such as from bacteria or virus particles etc., or from a tumor or cancerous tissue. The antigen or immunogen stimulates the body's adaptive immune system to provide an adaptive immune response.

[0069] Vector: The term ‘vector’ refers to a nucleic acid molecule, preferably to an artificial nucleic acid molecule. A vector in the context of the present invention is suitable for incorporating or harboring a desired nucleic acid sequence, such as a nucleic acid sequence comprising an open reading frame. Such vectors may be storage vectors, expression vectors, cloning vectors, transfer vectors etc. A storage vector is a vector which allows the convenient storage of a nucleic acid molecule, for example, of an mRNA molecule. Thus, the vector may comprise a sequence corresponding, e.g., to a desired mRNA sequence or a part thereof, such as a sequence corresponding to the open reading frame and the 3′UTR of an mRNA. An expression vector may be used for production of expression products such as RNA, e.g. mRNA, or peptides, polypeptides or proteins. For example, an expression vector may comprise sequences needed for transcription of a sequence stretch of the vector, such as a promoter sequence, e.g. an RNA promoter sequence. A cloning vector is typically a vector that contains a cloning site, which may be used to incorporate nucleic acid sequences into the vector. A cloning vector may be, e.g., a plasmid vector or a bacteriophage vector. A transfer vector may be a vector which is suitable for transferring nucleic acid molecules into cells or organisms, for example, viral vectors. A vector in the context of the present invention may be, e.g., an RNA vector or a DNA vector. Preferably, a vector is a DNA molecule. Preferably, a vector in the sense of the present application comprises a cloning site, a selection marker, such as an antibiotic resistance factor, and a sequence suitable for multiplication of the vector, such as an origin of replication. Preferably, a vector in the context of the present application is a plasmid vector.

[0070] Vehicle: A vehicle is typically understood to be a material that is suitable for storing, transporting, and/or administering a compound, such as a pharmaceutically active compound. For example, it may be a physiologically acceptable liquid which is suitable for storing, transporting, and/or administering a pharmaceutically active compound.

[0071] 3′-untranslated region (3′UTR): A 3′UTR is typically the part of an mRNA which is located between the protein coding region (i.e. the open reading frame) and the poly(A) sequence of the mRNA. A 3′UTR of the mRNA is not translated into an amino acid sequence. The 3′UTR sequence is generally encoded by the gene which is transcribed into the respective mRNA during the gene expression process. The genomic sequence is first transcribed into pre-mature mRNA, which comprises optional introns. The pre-mature mRNA is then further processed into mature mRNA in a maturation process. This maturation process comprises the steps of 5′capping, splicing the pre-mature mRNA to excise optional introns and modifications of the 3′-end, such as polyadenylation of the 3′-end of the pre-mature mRNA and optional endo- or exonuclease cleav-ages etc. In the context of the present invention, a 3′UTR corresponds to the sequence of a mature mRNA which is located 3′ to the stop codon of the protein coding region, preferably immediately 3′ to the stop codon of the protein coding region, and which extends to the 5′-side of the poly(A) sequence, preferably to the nucleotide immediately 5′ to the poly(A) sequence. The term “corresponds to” means that the 3′UTR sequence may be an RNA sequence, such as in the mRNA sequence used for defining the 3′UTR sequence, or a DNA sequence which corresponds to such RNA sequence. In the context of the present invention, the term “a 3′UTR of a gene”, such as “a 3′UTR of an albumin gene”, is the sequence which corresponds to the 3′UTR of the mature mRNA derived from this gene, i.e. the mRNA obtained by transcription of the gene and maturation of the pre-mature mRNA. The term “3′UTR of a gene” encompasses the DNA sequence and the RNA sequence of the 3′UTR.

[0072] 5′-untranslated region (5′UTR): A 5′UTR is typically understood to be a particular sec-tion of messenger RNA (mRNA). It is located 5′ of the open reading frame of the mRNA. Typically, the 5′UTR starts with the transcriptional start site and ends one nucleotide before the start codon of the open reading frame. The 5′UTR may comprise elements for controlling gene expression, also called regulatory elements. Such regulatory elements may be, for example, ribosomal binding sites or a 5′-Terminal Oligopyrimidine Tract. The 5′UTR may be posttranscription-ally modified, for example by addition of a 5′-cap. In the context of the present invention, a 5′UTR corresponds to the sequence of a mature mRNA which is located between the 5′cap and the start codon. Preferably, the 5′UTR corresponds to the sequence which extends from a nucleotide located 3′ to the 5′-cap, preferably from the nucleotide located immediately 3′ to the 5′cap, to a nucleotide located 5′ to the start codon of the protein coding region, preferably to the nucleotide located immediately 5′ to the start codon of the protein coding region. The nucleotide located immediately 3′ to the 5′cap of a mature mRNA typically corresponds to the transcriptional start site. The term “corresponds to” means that the 5′UTR sequence may be an RNA sequence, such as in the mRNA sequence used for defining the 5′UTR sequence, or a DNA sequence which corresponds to such RNA sequence. In the context of the present invention, the term “a 5′UTR of a gene”, such as “a 5′UTR of a TOP gene”, is the sequence which corresponds to the 5′UTR of the mature mRNA derived from this gene, i.e. the mRNA obtained by transcription of the gene and maturation of the pre-mature mRNA. The term “5′UTR of a gene” encompasses the DNA sequence and the RNA sequence of the 5′UTR.

[0073] 5′Terminal Oligopyrimidine Tract (TOP): The 5′terminal oligopyrimidine tract (TOP) is typically a stretch of pyrimidine nucleotides located at the 5′ terminal region of a nucleic acid molecule, such as the 5′ terminal region of certain mRNA molecules or the 5′ terminal region of a functional entity, e.g. the transcribed region, of certain genes. The sequence starts with a cytidine, which usually corresponds to the transcriptional start site, and is followed by a stretch of usually about 3 to 30 pyrimidine nucleotides. For example, the TOP may comprise 3, 4, 5, 6, 7, 8, 9, 10, 11, 12, 13, 14, 15, 16, 17, 18, 19, 20, 21, 22, 23, 24, 25, 26, 27, 28, 29, 30 or even more nucleotides. The pyrimidine stretch and thus the 5′ TOP ends one nucleotide 5′ to the first purine nucleotide located downstream of the TOP. Messenger RNA that contains a 5′terminal oligopyrimidine tract is often referred to as 5′ TOP mRNA. Accordingly, genes that provide such messenger RNAs are referred to as TOP genes. TOP sequences have, for example, been found in genes and mRNAs encoding peptide elongation factors and ribosomal proteins.

[0074] TOP motif: In the context of the present invention, a TOP motif is a nucleic acid sequence which corresponds to a 5′TOP as defined above. Thus, a TOP motif in the context of the present invention is preferably a stretch of pyrimidine nucleotides having a length of 3-30 nucleotides. Preferably, the TOP-motif consists of at least 3 pyrimidine nucleotides, preferably at least 4 pyrimidine nucleotides, preferably at least 5 pyrimidine nucleotides, more preferably at least 6 nucleotides, more preferably at least 7 nucleotides, most preferably at least 8 pyrimidine nucleotides, wherein the stretch of pyrimidine nucleotides preferably starts at its 5′end with a cytosine nucleotide. In TOP genes and TOP mRNAs, the TOP-motif preferably starts at its 5′end with the transcriptional start site and ends one nucleotide 5′ to the first purin residue in said gene or mRNA. A TOP motif in the sense of the present invention is preferably located at the 5′end of a sequence which represents a 5′UTR or at the 5′end of a sequence which codes for a 5′UTR. Thus, preferably, a stretch of 3 or more pyrimidine nucleotides is called “TOP motif” in the sense of the present invention if this stretch is located at the 5′end of a respective sequence, such as the artificial nucleic acid molecule according to the present invention, the 5′UTR element of the artificial nucleic acid molecule according to the present invention, or the nucleic acid sequence which is derived from the 5′UTR of a TOP gene as described herein. In other words, a stretch of 3 or more pyrimidine nucleotides which is not located at the 5′-end of a 5′UTR or a 5′UTR element but anywhere within a 5′UTR or a 5′UTR element is preferably not referred to as “TOP motif”.

[0075] TOP gene: TOP genes are typically characterised by the presence of a 5′ terminal oligopyrimidine tract. Furthermore, most TOP genes are characterized by a growth-associated translational regulation. However, also TOP genes with a tissue specific translational regulation are known. As defined above, the 5′UTR of a TOP gene corresponds to the sequence of a 5′UTR of a mature mRNA derived from a TOP gene, which preferably extends from the nucleotide located 3′ to the 5′cap to the nucleotide located 5′ to the start codon. A 5′UTR of a TOP gene typically does not comprise any start codons, preferably no upstream AUGs (uAUGs) or upstream open reading frames (uORFs). Therein, upstream AUGs and upstream open reading frames are typically understood to be AUGs and open reading frames that occur 5′ of the start codon (AUG) of the open reading frame that should be translated. The 5′UTRs of TOP genes are generally rather short. The lengths of 5′UTRs of TOP genes may vary between 20 nucleotides up to 500 nucleotides, and are typically less than about 200 nucleotides, preferably less than about 150 nucleotides, more preferably less than about 100 nucleotides. Exemplary 5′UTRs of TOP genes in the sense of the present invention are the nucleic acid sequences extending from the nucleotide at position 5 to the nucleotide located immediately 5′ to the start codon (e.g. the ATG) in the sequences according to SEQ ID NOs. 1-1363, 1435, 1461 and 1462.

[0076] In a first aspect, the present invention relates to an artificial nucleic acid molecule comprising:
[0077] a. at least one 5′-untranslated region element (5′UTR element) which comprises or consists of a nucleic acid sequence which is derived from the 5′UTR of a TOP gene or which is derived from a variant of the 5′UTR of a TOP gene; and
[0078] b. at least one open reading frame (ORF).

[0079] Preferably, the artificial nucleic acid molecule further comprises:
[0080] c. at least one histone stem-loop.

[0081] Such an artificial nucleic acid molecule may be DNA or RNA. In case the artificial nucleic acid molecule is DNA it may be used for providing RNA, preferably an mRNA with a corresponding sequence as is described further below. The inventive artificial nucleic acid molecule is particularly useful in gene therapy and genetic vaccination because it may provide increased and/or prolonged protein production of the protein encoded by the open reading frame.

[0082] In this context, the term ‘5′UTR element’ preferably refers to a nucleic acid sequence which represents a 5′UTR of an artificial nucleic acid sequence, such as an artificial mRNA, or which codes for a 5′UTR of an artificial nucleic acid molecule. Thus, preferably, a 5′UTR element may be the 5′UTR of an mRNA, preferably of an artificial mRNA, or it may be the transcription template for a 5′UTR of an mRNA. Thus, a 5′UTR element preferably is a nucleic acid sequence which corresponds to the 5′UTR of an mRNA, preferably to the 5′UTR of an artificial mRNA, such as an mRNA obtained by transcription of a genetically engineered vector construct.

[0083] Preferably, a 5′UTR element in the sense of the present invention functions as a 5′UTR or codes for a nucleotide sequence that fulfils the function of a 5′UTR. The term ‘5′UTR element’ furthermore refers to a fragment or part of a 5′UTR of an artificial nucleic acid sequence, such as an artificial mRNA, or which codes for a part or fragment of a 5′UTR of an artificial nucleic acid molecule. This means that the 5′UTR element in the sense of the present invention may be comprised in the 5′UTR of an artificial nucleic acid sequence, such as an artificial mRNA, or which codes for a 5′UTR of an artificial nucleic acid molecule.

[0084] According to the invention, the 5′UTR element comprises or consists of a nucleic acid sequence that is derived from the 5′UTR of a TOP gene or from a variant of the 5′UTR of a TOP gene.

[0085] The term ‘a nucleic acid sequence which is derived from the 5′UTR of a TOP gene’ preferably refers to a nucleic acid sequence which is based on the 5′UTR sequence of a TOP gene or on a fragment thereof. This term includes sequences corresponding to the entire 5′UTR sequence, i.e. the full length 5′UTR sequence of a TOP gene, and sequences corresponding to a fragment of the 5′UTR sequence of a TOP gene. Preferably, a fragment of a 5′UTR of a TOP gene consists of a continuous stretch of nucleotides corresponding to a continuous stretch of nucleotides in the full-length 5′UTR of a TOP gene, which represents at least 20%, preferably at least 30%, more preferably at least 40%, more preferably at least 50%, even more preferably at least 60%, even more preferably at least 70%, even more preferably at least 80%, and most preferably at least 90% of the full-length 5′UTR of a TOP gene. Such a fragment, in the sense of the present invention, is preferably a functional fragment as described herein. A particularly preferred fragment of a 5′UTR of a TOP gene is a 5′UTR of a TOP gene lacking the 5′TOP motif. The term ‘5′UTR of a TOP gene’ preferably refers to the 5′UTR of a naturally occurring TOP gene.

[0086] The terms ‘variant of the 5′UTR of a TOP gene’ and ‘variant thereof’ in the context of a 5′UTR of a TOP gene refers to a variant of the 5′UTR of a naturally occurring TOP gene, preferably to a variant of the 5′UTR of a vertebrate TOP gene, preferably to a variant of the 3′UTR of a mammalian TOP gene, more preferably to a variant of the 3′UTR of a human TOP gene. Such variant may be a modified 5′UTR of a TOP gene. For example, a variant 5′UTR may exhibit one or more nucleotide deletions, insertions, additions and/or substitutions compared to the naturally occurring 5′UTR from which the variant is derived. Preferably, a variant of a 5′UTR of a TOP gene is at least 40%, preferably at least 50%, more preferably at least 60%, more preferably at least 70%, even more preferably at least 80%, even more preferably at least 90%, most preferably at least 95% identical to the naturally occurring 5′UTR the variant is derived from. Preferably, the variant is a functional variant as described herein.

[0087] The term “a nucleic acid sequence that is derived from a variant of the 5′UTR of a TOP gene” preferably refers to a nucleic acid sequence which is based on a variant of a 5′UTR sequence of a TOP gene or on a fragment thereof This term includes sequences corresponding to the entire variant 5′UTR sequence, i.e. the full length variant 5′UTR sequence of a TOP gene, and sequences corresponding to a fragment of the variant 5′UTR sequence of a TOP gene. Preferably, a fragment of a variant of the 5′UTR of a TOP gene consists of a continuous stretch of nucleotides corresponding to a continuous stretch of nucleotides in the full-length variant 5′UTR of a TOP gene, which represents at least 20%, preferably at least 30%, more preferably at least 40%, more preferably at least 50%, even more preferably at least 60%, even more preferably at least 70%, even more preferably at least 80%, and most preferably at least 90% of the full-length variant 5′UTR of a TOP gene. Such a fragment of a variant, in the sense of the present invention, is preferably a functional fragment as described herein.

[0088] Thus, the 5′UTR element of the artificial nucleic acid molecule may comprise or consist of a fragment of the 5′UTR of a TOP gene or of a fragment of a variant of the 5′UTR of a TOP gene or may comprise or consist of the entire 5′UTR of a TOP gene or may comprise or consist of a variant of the 5′UTR of a TOP gene.

[0089] The 5′UTR element is preferably suitable for increasing protein production from the artificial nucleic acid molecule.

[0090] Preferably, the at least one 5′UTR element is functionally linked to the ORF. This means preferably that the 5′UTR element is associated with the ORF such that it may exert a function, such as a protein production increasing function for the protein encoded by the ORF or a stabilizing function on the artificial nucleic acid molecule. Preferably, the 5′UTR element and the ORF are associated in 5′43′ direction. Thus, preferably, the artificial nucleic acid molecule comprises the structure 5′-5′UTR element-(optional)linker-ORF-3′, wherein the linker may be present or absent. For example, the linker may be one or more nucleotides, such as a stretch of 1-50 or 1-20 nucleotides, e.g., comprising or consisting of one or more restriction enzyme recognition sites (restriction sites).

[0091] Preferably, the 5′UTR element and the at least one open reading frame are heterologous. The term ‘heterologous’ in this context means that the open reading frame and the 5′UTR element are not occurring naturally (in nature) in this combination. Preferably, the 5′UTR element is derived from a different gene than the open reading frame. For example, the ORF may be derived from a different gene than the 5′UTR element, e.g. encoding a different protein or the same protein but of a different species etc. For example, the ORF does not encode the protein which is encoded by the gene from which the 5′UTR element is derived.

[0092] In a preferred embodiment, the 5′UTR element, preferably the artificial nucleic acid molecule, does not comprise a complete TOP-motif or 5′TOP sequence. Thus, preferably, the 5′UTR element, preferably the artificial nucleic acid molecule, does not comprise the complete TOP-motif of the TOP gene from which the nucleic acid sequence of the 5′UTR element is derived. For example, the 5′UTR element or the artificial nucleic acid molecule according to the present invention may comprise 1, 2, 3, 4, 5, 6, 7, 8, 9, 10 or more pyrimidine residues of the TOP-motif or 5′TOP, preferably 1, 2, 3, 4, 5, 6, 7, 8, 9, 10 or more pyrimidine residues of the TOP-motif located at the 3′side of the TOP-motif or 5′TOP. For example, the 5′UTR element may comprise or consist of a nucleic acid sequence which starts at its 5′end with a pyrimidine residue that corresponds to residue 2, 3, 4, 5, 6, 7, 8, 9, 10 etc. of the TOP-motif or 5′TOP of the TOP gene from which the nucleic acid sequence of the 5′UTR element is derived.

[0093] It is particularly preferred that the 5′UTR element, preferably the artificial nucleic acid molecule according to the present invention, does not comprise a TOP-motif or 5′TOP. For example, the nucleic acid sequence of the 5′UTR element which is derived from a 5′UTR of a TOP gene starts at its 5′-end with a nucleotide located at position 1, 2, 3, 4, 5, 6, 7, 8, 9 or 10 downstream of the 5′terminal oligopyrimidine tract (TOP) of the 5′UTR of a TOP gene. Position 1 downstream of the 5′terminal oligopyrimidine tract (TOP) is the first purine based nucleotide 3′ of the TOP-motif or the 5′TOP. Accordingly, position 1 downstream of the 5′terminal oligopyrimidine tract is the first nucleotide following the 3′-end of the 5′terminal oligopyrimidine tract in 5′-3′-direction. Likewise, position 2 downstream of the 5′TOP is the second nucleotide following the end of the 5′terminal oligopyrimidine tract, position 3 the third nucleotide and so on.

[0094] Therefore, the 5′UTR element preferably starts 5, 10, 15, 20, 25, 30, 40 or 50 nucleotides downstream of the transcriptional start site of the 5′UTR of a TOP gene.

[0095] In some embodiments, the nucleic acid sequence of the 5′UTR element which is derived from a 5′UTR of a TOP gene terminates at its 3′-end with a nucleotide located at position 1, 2, 3, 4, 5, 6, 7, 8, 9 or 10 upstream of the start codon (e.g. A(U/T)G) of the gene or mRNA it is derived from. Thus, the 5′UTR element does not comprise any part of the protein coding region. Thus, preferably, the only protein coding part of the inventive artificial nucleic acid molecule is provided by the open reading frame. However, the open reading frame is preferably derived—as said above—from a gene that is different to the gene the 5′UTR element is derived from.

[0096] It is particularly preferred that the 5′UTR element does not comprise a start codon, such as the nucleotide sequence A(U/T)G. Thus, preferably, the artificial nucleic acid molecule will not comprise any upstream AUGs (or upstream ATGs in case it is a DNA molecule). In other words, in some embodiments, it may be preferred that the AUG or ATG, respectively, of the open reading frame is the only start codon of the artificial nucleic acid molecule.

[0097] Additionally, it is preferred that the 5′UTR element does not comprise an open reading frame. Thus, preferably, the artificial nucleic acid molecule will not comprise any upstream open reading frames.

[0098] The nucleic acid sequence which is derived from the 5′UTR of a TOP gene is derived from a eukaryotic TOP gene, preferably a plant or animal TOP gene, more preferably a chordate TOP gene, even more preferably a vertebrate TOP gene, most preferably a mammalian TOP gene, such as a human or mouse TOP gene.

[0099] Preferably, the artificial nucleic acid molecule according to the present invention comprises a 5′UTR element which comprises or consists of a nucleic acid sequence which is derived from the 5′UTR of a TOP gene or which is derived from a variant of the 5′UTR of a TOP gene, wherein the TOP gene is a plant or animal TOP gene, more preferably a chordate TOP gene, even more preferably a vertebrate TOP gene, most preferably a mammalian TOP gene, such as a human or mouse TOP gene and which optionally does not comprise the nucleotide sequence A(U/T)G and optionally does not comprise an open reading frame; at least one open reading frame (ORF); and optionally at least one histone-stem loop; wherein optionally the 5′UTR element does not comprise a TOP motif and wherein optionally the 5′UTR element starts at its 5′-end with a nucleotide located at position 1, 2, 3, 4, 5, 6, 7, 8, 9 or 10 downstream of the 5′terminal oligopyrimidine tract (TOP) of the 5′UTR of a TOP gene and wherein further optionally the 5′UTR element which is derived from a 5′UTR of a TOP gene terminates at its 3′-end with a nucleotide located at position 1, 2, 3, 4, 5, 6, 7, 8, 9 or 10 upstream of the start codon (A(U/T)G) of the gene or mRNA it is derived from.

[0100] For example, the 5′UTR element comprises or consists of a nucleic acid sequence which is derived from a nucleic acid sequence selected from the group consisting of SEQ ID NOs. 1-1363, SEQ ID NO. 1435, SEQ ID NO. 1461 or SEQ ID NO. 1462, from the homologs of SEQ ID NOs. 1-1363, SEQ ID NO. 1435, SEQ ID NO. 1461 or SEQ ID NO. 1462, from a variant thereof, or a corresponding RNA sequence. The term “homologs of SEQ ID NOs. 1-1363, SEQ ID NO. 1435, SEQ ID NO. 1461 or SEQ ID NO. 1462,”refers to sequences of other species than Homo sapiens (human) or Mus musculus (mouse), which are homologous to the sequences according to SEQ ID NOs. 1-1363, SEQ ID NO. 1435, SEQ ID NO. 1461 or SEQ ID NO. 1462. For example, SEQ ID NO. 1 relates to a sequence comprising the 5′UTR of Homo sapiens alpha 2 macroglobulin (A2M). A homolog of SEQ ID NO. 1 in the context of the present invention is any such sequence derived from an alpha 2 macroglobulin (A2M) gene or mRNA of another species than Homo sapiens (human), such as any vertebrate, preferably any mammalian alpha 2 macroglobulin (A2M) gene other than the human alpha 2 macroglobulin (A2M) gene, such as a mouse, rat, rabbit, monkey etc. alpha 2 macroglobulin (A2M) gene.

[0101] In a preferred embodiment, the 5′UTR element comprises or consists of a nucleic acid sequence which is derived from a nucleic acid sequence extending from nucleotide position 5 (i.e. the nucleotide that is located at position 5 in the sequence) to the nucleotide position immediately 5′ to the start codon (located at the 3′ end of the sequences), e.g. the nucleotide position immediately 5′ to the ATG sequence, of a nucleic acid sequence selected from SEQ ID NOs. 1-1363, SEQ ID NO. 1435, SEQ ID NO. 1461 or SEQ ID NO. 1462, from the homologs of SEQ ID NOs. 1-1363, SEQ ID NO. 1435, SEQ ID NO. 1461 or SEQ ID NO. 1462, from a variant thereof, or a corresponding RNA sequence. It is particularly preferred that the 5′ UTR element is derived from a nucleic acid sequence extending from the nucleotide position immediately 3′ to the 5′-TOP to the nucleotide position immediately 5′ to the start codon (located at the 3′ end of the sequences), e.g. the nucleotide position immediately 5′ to the ATG sequence, of a nucleic acid sequence selected from SEQ ID NOs. 1-1363, SEQ ID NO. 1435, SEQ ID NO. 1461 or SEQ ID NO. 1462, from the homologs of SEQ ID NOs. 1-1363, SEQ ID NO. 1435, SEQ ID NO. 1461 or SEQ ID NO. 1462, from a variant thereof, or a corresponding RNA sequence.

[0102] In a preferred embodiment, the 5′UTR element comprises or consists of a nucleic acid sequence which has an identity of at least about 40%, preferably of at least about 50%, preferably of at least about 60%, preferably of at least about 70%, more preferably of at least about 80%, more preferably of at least about 90%, even more preferably of at least about 95%, even more preferably of at least about 99% to a nucleic acid sequence extending from nucleotide position 5 to the nucleotide position immediately 5′ to the start codon (located at the 3′ end of the sequences), e.g. the nucleotide position immediately 5′ to the ATG sequence of a nucleic acid sequence, selected from SEQ ID NOs. 1-1363, SEQ ID NO. 1435, SEQ ID NO. 1461 or SEQ ID NO. 1462, or a corresponding RNA sequence, or wherein the at least one 5′UTR element comprises or consists of a fragment of a nucleic acid sequence which has an identity of at least about 40%, preferably of at least about 50%, preferably of at least about 60%, preferably of at least about 70%, more preferably of at least about 80%, more preferably of at least about 90%, even more preferably of at least about 95%, even more preferably of at least about 99% to a nucleic acid sequence extending from nucleotide position 5 to the nucleotide position immediately 5′ to the start codon (located at the 3′ end of the sequences), e.g. the nucleotide position immediately 5′ to the ATG sequence of a nucleic acid sequence, selected from SEQ ID NOs. 1-1363, SEQ ID NO. 1435, SEQ ID NO. 1461 or SEQ ID NO. 1462, or a corresponding RNA sequence, wherein, preferably, the fragment is as described above, i.e. being a continuous stretch of nucleotides representing at least 20% etc. of the full-length 5′UTR the fragment is derived from.

[0103] Preferably, the 5′UTR element comprises or consists of a nucleic acid sequence which has an identity of at least about 40%, preferably of at least about 50%, preferably of at least about 60%, preferably of at least about 70%, more preferably of at least about 80%, more preferably of at least about 90%, even more preferably of at least about 95%, even more preferably of at least about 99% to a nucleic acid sequence extending from the nucleotide position immediately 3′ to the 5′TOP to the nucleotide position immediately 5′ to the start codon (located at the 3′ end of the sequences), e.g. the nucleotide position immediately 5′ to the ATG sequence, of a nucleic acid sequence selected from SEQ ID NOs. 1-1363, SEQ ID NO. 1435, SEQ ID NO. 1461 or SEQ ID NO. 1462, or a corresponding RNA sequence, or wherein the at least one 5′UTR element comprises or consists of a fragment of a nucleic acid sequence which has an identity of at least about 40%, preferably of at least about 50%, preferably of at least about 60%, preferably of at least about 70%, more preferably of at least about 80%, more preferably of at least about 90%, even more preferably of at least about 95%, even more preferably of at least about 99% to a nucleic acid sequence extending from the nucleotide position immediately 3′ to the 5′TOP to the nucleotide position immediately 5′ to the start codon (located at the 3′ end of the sequences), e.g. the nucleotide position immediately 5′ to the ATG sequence, of a nucleic acid sequence selected from SEQ ID NOs. 1-1363, SEQ ID NO. 1435, SEQ ID NO. 1461 or SEQ ID NO. 1462, or a corresponding RNA sequence, wherein, preferably, the fragment is as described above, i.e. being a continuous stretch of nucleotides representing at least 20% etc. of the full-length 5′UTR the fragment is derived from.

[0104] Preferably, the above defined fragments and variants (e.g. exhibiting at least 40% identity) of the sequences according to SEQ ID NOs. 1-1363, SEQ ID NO. 1435, SEQ ID NO. 1461 or SEQ ID NO. 1462, are functional fragments and variants as described herein.

[0105] Furthermore, the artificial nucleic acid molecule according to the present invention may comprise more than one 5′UTR elements as described above. For example, the artificial nucleic acid molecule according to the present invention may comprise one, two, three, four or more 5′UTR elements, wherein the individual 5′UTR elements may be the same or they may be different. For example, the artificial nucleic acid molecule according to the present invention may comprise two essentially identical 5′UTR elements as described above, e.g. two 5′UTR elements comprising or consisting of a nucleic acid sequence which is derived from a nucleic acid sequence selected from the group consisting of SEQ ID NOs. 1-1363, SEQ ID NO. 1435, SEQ ID NO. 1461 or SEQ ID NO. 1462, from the homologs of SEQ ID NOs. 1-1363, SEQ ID NO. 1435, SEQ ID NO. 1461 or SEQ ID NO. 1462, from a variant thereof, or a corresponding RNA sequence or from functional variants thereof, functional fragments thereof, or functional variant fragments thereof as described above.

[0106] In a particularly preferred embodiment, the 5′UTR element comprises or consists of a nucleic acid sequence which is derived from a 5′UTR of a TOP gene encoding a ribosomal protein or from a variant of a 5′UTR of a TOP gene encoding a ribosomal protein. Particularly preferred 5′UTR elements comprise or consist of a nucleic acid sequence which are derived from a 5′ UTR of a TOP gene coding for a ribosomal protein selected from RPSA, RPS2, RPS3, RPS3A, RPS4, RPS5, RPS6, RPS7, RPS8, RPS9, RPS10, RPS11, RPS12, RPS13, RPS14, RPS15, RPS15A, RPS16, RPS17, RPS18, RPS19, RPS20, RPS21, RPS23, RPS24, RPS25, RPS26, RPS27, RPS27A, RPS28, RPS29, RPS30, RPL3, RPL4, RPL5, RPL6, RPL7, RPL7A, RPL8, RPL9, RPL10, RPL10A, RPL11, RPL12, RPL13, RPL13A, RPL14, RPL15, RPL17, RPL18, RPL18A, RPL19, RPL21, RPL22, RPL23, RPL23A, RPL24, RPL26, RPL27, RPL27A, RPL28, RPL29, RPL30, RPL31, RPL32, RPL34, RPL35, RPL35A, RPL36, RPL36A, RPL37, RPL37A, RPL38, RPL39, RPL40, RPL41, RPLP0, RPLP1, RPLP2, RPLP3, UBA52. Particularly preferred are nucleic acid sequences which are derived from a 5′ UTR of TOP genes vertebrate coding for ribosomal proteins, such as mammalian ribosomal proteins e.g. human or mouse ribosomal proteins.

[0107] For example, the 5′UTR element comprises or consists of a nucleic acid sequence which is derived from a 5′UTR of a nucleic acid sequence according to any of SEQ ID NOs: 170, 232, 244, 259, 1284, 1285, 1286, 1287, 1288, 1289, 1290, 1291, 1292, 1293, 1294, 1295, 1296, 1297, 1298, 1299, 1300, 1301, 1302, 1303, 1304, 1305, 1306, 1307, 1308, 1309, 1310, 1311, 1312, 1313, 1314, 1315, 1316, 1317, 1318, 1319, 1320, 1321, 1322, 1323, 1324, 1325, 1326, 1327, 1328, 1329, 1330, 1331, 1332, 1333, 1334, 1335, 1336, 1337, 1338, 1339, 1340, 1341, 1342, 1343, 1344, 1346, 1347, 1348, 1349, 1350, 1351, 1352, 1353, 1354, 1355, 1356, 1357, 1358, 1359, or 1360; a corresponding RNA sequence, a homolog thereof, or a variant thereof as described herein, preferably lacking the 5′TOP motif. As described above, the sequence extending from position 5 to the nucleotide immediately 5′ to the ATG (which is located at the 3′end of the sequences) corresponds to the 5′UTR of said sequences.

[0108] Preferably, the 5′UTR element comprises or consists of a nucleic acid sequence which has an identity of at least about 40%, preferably of at least about 50%, preferably of at least about 60%, preferably of at least about 70%, more preferably of at least about 80%, more preferably of at least about 90%, even more preferably of at least about 95%, even more preferably of at least about 99% to the 5′UTR of a nucleic acid sequence according to any of SEQ ID NOs: 170, 232, 244, 259, 1284, 1285, 1286, 1287, 1288, 1289, 1290, 1291, 1292, 1293, 1294, 1295, 1296, 1297, 1298, 1299, 1300, 1301, 1302, 1303, 1304, 1305, 1306, 1307, 1308, 1309, 1310, 1311, 1312, 1313, 1314, 1315, 1316, 1317, 1318, 1319, 1320, 1321, 1322, 1323, 1324, 1325, 1326, 1327, 1328, 1329, 1330, 1331, 1332, 1333, 1334, 1335, 1336, 1337, 1338, 1339, 1340, 1341, 1342, 1343, 1344, 1346, 1347, 1348, 1349, 1350, 1351, 1352, 1353, 1354, 1355, 1356, 1357, 1358, 1359, or 1360; or a corresponding RNA sequence, preferably lacking the 5′TOP motif, or wherein the at least one 5′UTR element comprises or consists of a fragment of a nucleic acid sequence which has an identity of at least about 40%, preferably of at least about 50%, preferably of at least about 60%, preferably of at least about 70%, more preferably of at least about 80%, more preferably of at least about 90%, even more preferably of at least about 95%, even more preferably of at least about 99% to the 5′UTR of a nucleic acid sequence according to SEQ ID NOs: 170, 232, 244, 259, 1284, 1285, 1286, 1287, 1288, 1289, 1290, 1291, 1292, 1293, 1294, 1295, 1296, 1297, 1298, 1299, 1300, 1301, 1302, 1303, 1304, 1305, 1306, 1307, 1308, 1309, 1310, 1311, 1312, 1313, 1314, 1315, 1316, 1317, 1318, 1319, 1320, 1321, 1322, 1323, 1324, 1325, 1326, 1327, 1328, 1329, 1330, 1331, 1332, 1333, 1334, 1335, 1336, 1337, 1338, 1339, 1340, 1341, 1342, 1343, 1344, 1346, 1347, 1348, 1349, 1350, 1351, 1352, 1353, 1354, 1355, 1356, 1357, 1358, 1359, or 1360; or a corresponding RNA sequence, wherein, preferably, the fragment is as described above, i.e. being a continuous stretch of nucleotides representing at least 20% etc. of the full-length 5′UTR, preferably lacking the 5′TOP motif. Preferably, the fragment exhibits a length of at least about 20 nucleotides or more, preferably of at least about 30 nucleotides or more, more preferably of at least about 40 nucleotides or more. Preferably, the fragment is a functional fragment as described herein.

[0109] Preferably, the 5′UTR element comprises or consists of a nucleic acid sequence which is derived from a 5′UTR of a TOP gene encoding a ribosomal Large protein (RPL) or from a variant of a 5′UTR of a TOP gene encoding a ribosomal Large protein (RPL). For example, the 5′UTR element comprises or consists of a nucleic acid sequence which is derived from a 5′UTR of a nucleic acid sequence according to any of SEQ ID NOs: 67, 259, 1284-1318, 1344, 1346, 1348-1354, 1357, 1461 and 1462, a corresponding RNA sequence, a homolog thereof, or a variant thereof as described herein, preferably lacking the 5′TOP motif.

[0110] Preferably, the 5′UTR element comprises or consists of a nucleic acid sequence which has an identity of at least about 40%, preferably of at least about 50%, preferably of at least about 60%, preferably of at least about 70%, more preferably of at least about 80%, more preferably of at least about 90%, even more preferably of at least about 95%, even more preferably of at least about 99% to the 5′UTR of a nucleic acid sequence according to any of SEQ ID NOs. 67, 259, 1284-1318, 1344, 1346, 1348-1354, 1357, and 1358 or a corresponding RNA sequence, preferably lacking the 5′TOP motif, or wherein the at least one 5′UTR element comprises or consists of a fragment of a nucleic acid sequence which has an identity of at least about 40%, preferably of at least about 50%, preferably of at least about 60%, preferably of at least about 70%, more preferably of at least about 80%, more preferably of at least about 90%, even more preferably of at least about 95%, even more preferably of at least about 99% to the 5′UTR of a nucleic acid sequence according to SEQ ID NOs: 67, 259, 1284-1318, 1344, 1346, 1348-1354, 1357, 1461 and 1462 or a corresponding RNA sequence, wherein, preferably, the fragment is as described above, i.e. being a continuous stretch of nucleotides representing at least 20% etc. of the full-length 5′UTR, preferably lacking the 5′TOP motif. Preferably, the fragment exhibits a length of at least about 20 nucleotides or more, preferably of at least about 30 nucleotides or more, more preferably of at least about 40 nucleotides or more. Preferably, the fragment is a functional fragment as described herein.

[0111] In a particularly preferred embodiment, the 5′UTR element comprises or consists of a nucleic acid sequence which is derived from the 5′UTR of a ribosomal protein Large 32 gene (RPL32), a ribosomal protein Large 35 gene (RPL35), a ribosomal protein Large 21 gene (RPL21), an ATP synthase, H+ transporting, mitochondrial F1 complex, alpha subunit 1, cardiac muscle (ATP5A1) gene, an hydroxysteroid (17-beta) dehydrogenase 4 gene (HSD17B4), an androgen-induced 1 gene (AIG1), cytochrome c oxidase subunit VIc gene (COX6C), or a N-acylsphingosine amidohydrolase (acid ceramidase) 1 gene (ASAH1) or from a variant thereof, preferably from a vertebrate ribosomal protein Large 32 gene (RPL32), a vertebrate ribosomal protein Large 35 gene (RPL35), a vertebrate ribosomal protein Large 21 gene (RPL21), a vertebrate ATP synthase, H+ transporting, mitochondrial F1 complex, alpha subunit 1, cardiac muscle (ATP5A1) gene, a vertebrate hydroxysteroid (17-beta) dehydrogenase 4 gene (HSD17B4), a vertebrate androgen-induced 1 gene (AIG1), a vertebrate cytochrome c oxidase subunit VIc gene (COX6C), or a vertebrate N-acylsphingosine amidohydrolase (acid ceramidase) 1 gene (ASAH1) or from a variant thereof, more preferably from a mammalian ribosomal protein Large 32 gene (RPL32), a ribosomal protein Large 35 gene (RPL35), a ribosomal protein Large 21 gene (RPL21), a mammalian ATP synthase, H+ transporting, mitochondrial F1 complex, alpha subunit 1, cardiac muscle (ATP5A1) gene, a mammalian hydroxysteroid (17-beta) dehydrogenase 4 gene (HSD17B4), a mammalian androgen-induced 1 gene (AIG1), a mammalian cytochrome c oxidase subunit VIc gene (COX6C), or a mammalian N-acylsphingosine amidohydrolase (acid ceramidase) 1 gene (ASAH1) or from a variant thereof, most preferably from a human ribosomal protein Large 32 gene (RPL32), a human ribosomal protein Large 35 gene (RPL35), a human ribosomal protein Large 21 gene (RPL21), a human ATP synthase, H+ transporting, mitochondrial F1 complex, alpha subunit 1, cardiac muscle (ATP5A1) gene, a human hydroxysteroid (17-beta) dehydrogenase 4 gene (HSD17B4), a human androgen-induced 1 gene (AIG1), a human cytochrome c oxidase subunit VIc gene (COX6C), or a human N-acylsphingosine amidohydrolase (acid ceramidase) 1 gene (ASAH1) or from a variant thereof, wherein preferably the 5′UTR element does not comprise the 5′TOP of said gene.

[0112] Accordingly, in a particularly preferred embodiment, the 5′UTR element comprises or consists of a nucleic acid sequence which has an identity of at least about 40%, preferably of at least about 50%, preferably of at least about 60%, preferably of at least about 70%, more preferably of at least about 80%, more preferably of at least about 90%, even more preferably of at least about 95%, even more preferably of at least about 99% to the nucleic acid sequence according to SEQ ID No. 1368, or SEQ ID NOs 1452-1460 or a corresponding RNA sequence, or wherein the at least one 5′UTR element comprises or consists of a fragment of a nucleic acid sequence which has an identity of at least about 40%, preferably of at least about 50%, preferably of at least about 60%, preferably of at least about 70%, more preferably of at least about 80%, more preferably of at least about 90%, even more preferably of at least about 95%, even more preferably of at least about 99% to the nucleic acid sequence according to SEQ ID No. 1368, or SEQ ID NOs 1452-1460 wherein, preferably, the fragment is as described above, i.e. being a continuous stretch of nucleotides representing at least 20% etc. of the full-length 5′UTR. Preferably, the fragment exhibits a length of at least about 20 nucleotides or more, preferably of at least about 30 nucleotides or more, more preferably of at least about 40 nucleotides or more. Preferably, the fragment is a functional fragment as described herein.

[0113] Preferably, the at least one 5′UTR element exhibits a length of at least about 20 nucleotides or more, preferably of at least about 30 nucleotides or more, more preferably of at least about 40 nucleotides or more. However, it may be preferred if the 5′UTR element of the artificial nucleic acid molecule is rather short. Accordingly, it may have a length of less than about 200, preferably less than 150, more preferably less than 100 nucleotides. For example, the 5′UTR may have a length of less than about 25, 30, 35, 40, 45, 50, 55, 60, 65, 70, 80, 85, 90, 95, 100, 105, 110, 115, 120, 125, 130, 135, 140, 145, 150, 155, 160, 165, 170, 175, 180, 185, 190, 195, 200 nucleotides Preferably, the 5′UTR element may have a length of about 20-25, 26-30, 31-35, 36-40, 41-45, 46-50, 51-55, 56-60, 61-65, 66-70, 71-80, 81-85, 86-90, 91-95, 96-100, 101-105, 106-110, 111-115, 116-120, 121-125, 126-130, 131-135, 136-140, 141-145, 146-150, 151-155, 156-160, 161-165, 166-170, 171-175, 176-180, 181-185, 186-190, 191-195, 196-200 or more nucleotides. For example, the 5′UTR element may have a length of about 20, 26, 31, 36, 41, 46, 51, 56, 61, 66, 71, 81, 86, 91, 96, 101, 106, 111, 116, 121, 126, 131, 136, 141, 146, 151, 156, 161, 166, 171, 176, 181, 186, 191 or 196 nucleotides. Preferably, the 5′UTR element may have a length from about 20, 30, 40 or more to less than about 200 nucleotides, more preferably from about 20, 30, 40 or more to less than about 150 nucleotides, most preferably from about 20, 30, 40 or more to less than about 100 nucleotides.

[0114] Preferred 5′UTR elements are derived from a 5′ UTR of a TOP gene selected from RPSA, RPS2, RPS3, RPS3A, RPS4, RPS5, RPS6, RPS7, RPS8, RPS9, RPS10, RPS11, RPS12, RPS13, RPS14, RPS15, RPS15A, RPS16, RPS17, RPS18, RPS19, RPS20, RPS21, RPS23, RPS24, RPS25, RPS26, RPS27, RPS27A, RPS28, RPS29, RPS30, RPL3, RPL4, RPL5, RPL6, RPL7, RPL7A, RPL8, RPL9, RPL10, RPL10A, RPL11, RPL12, RPL13, RPL13A, RPL14, RPL15, RPL17, RPL 18, RPL18A, RPL 19, RPL21, RPL22, RPL23, RPL23A, RPL24, RPL26, RPL27, RPL27A, RPL28, RPL29, RPL30, RPL31, RPL32, RPL34, RPL35, RPL35A, RPL36, RPL36A, RPL37, RPL37A, RPL38, RPL39, RPL40, RPL41, RPLP0, RPLP1, RPLP2, RPLP3, RPLP0, RPLP1, RPLP2, EEF1A1, EEF1B2, EEF1D, EEF1G, EEF2, EIF3E, EIF3F, EIF3H, EIF2S3, EIF3C, EIF3K, EIF3E1P, EIF4A2, PABPC1, HNRNPA1, TPT1, TUBB1, UBA52, NPM1, ATP5G2, GNB2L1, NME2, UQCRB or from a variant thereof.

[0115] In some embodiments, the artificial nucleic acid molecule comprises a 5′UTR element which comprises or consists of a nucleic acid sequence which is derived from the 5′UTR of a vertebrate TOP gene, such as a mammalian, e.g. a human TOP gene, selected from RPSA, RPS2, RPS3, RPS3A, RPS4, RPS5, RPS6, RPS7, RPS8, RPS9, RPS10, RPS11, RPS12, RPS13, RPS14, RPS15, RPS15A, RPS16, RPS17, RPS18, RPS19, RPS20, RPS21, RPS23, RPS24, RPS25, RPS26, RPS27, RPS27A, RPS28, RPS29, RPS30, RPL3, RPL4, RPL5, RPL6, RPL7, RPL7A, RPL8, RPL9, RPL10, RPL10A, RPL11, RPL12, RPL13, RPL13A, RPL14, RPL15, RPL17, RPL18, RPL18A, RPL19, RPL21, RPL22, RPL23, RPL23A, RPL24, RPL26, RPL27, RPL27A, RPL28, RPL29, RPL30, RPL31, RPL32, RPL34, RPL35, RPL35A, RPL36, RPL36A, RPL37, RPL37A, RPL38, RPL39, RPL40, RPL41, RPLP0, RPLP1, RPLP2, RPLP3, RPLP0, RPLP1, RPLP2, EEF1A1, EEF1B2, EEF1D, EEF1G, EEF2, EIF3E, EIF3F, EIF3H, EIF2S3, EIF3C, EIF3K, EIF3E1P, EIF4A2, PABPC1, HNRNPA1, TPT1, TUBB1, UBA52, NPM1, ATP5G2, GNB2L1, NME2, UQCRB or from a variant thereof, wherein preferably the 5′UTR element does not comprise a TOP motif or the 5′TOP of said genes, and wherein optionally the 5′UTR element starts at its 5′-end with a nucleotide located at position 1, 2, 3, 4, 5, 6, 7, 8, 9 or 10 downstream of the 5′terminal oligopyrimidine tract (TOP) and wherein further optionally the 5′UTR element which is derived from a 5′UTR of a TOP gene terminates at its 3′-end with a nucleotide located at position 1, 2, 3, 4, 5, 6, 7, 8, 9 or 10 upstream of the start codon (A(U/T)G) of the gene it is derived from.

[0116] In a particularly preferred embodiment, the artificial nucleic acid molecule further comprises a histone stem-loop.

[0117] Accordingly, it is particularly preferred that the artificial nucleic acid molecule according to the present invention comprises:
[0118] a. at least one 5′-untranslated region element (5′UTR element) which comprises or consists of a nucleic acid sequence which is derived from the 5′UTR of a TOP gene or which is derived from a variant of the 5′UTR of a TOP gene as described above;
[0119] b. at least one open reading frame (ORF); and
[0120] c. at least one histone stem-loop.

[0121] The combination of a 5′UTR element as described above with a histone stem-loop may have a particularly advantageous effect in providing prolonged and possibly also enhanced translation of an RNA molecule.

[0122] In the context of the present invention, such a histone stem-loop is typically derived from a histone gene and comprises an intramolecular base pairing of two neighbored entirely or partially reverse complementary sequences, thereby forming a stem-loop. A stem-loop can occur in single-stranded DNA or, more commonly, in RNA. The structure is also known as a hairpin or hairpin loop and usually consists of a stem and a (terminal) loop within a consecutive sequence, wherein the stem is formed by two neighbored entirely or partially reverse complementary sequences separated by a short sequence as sort of spacer, which builds the loop of the stem-loop structure.

[0123] The two neighbored entirely or partially reverse complementary sequences may be defined as e.g. stem-loop elements stem1 and stem2. The stem loop is formed when these two neighbored entirely or partially reverse complementary sequences, e.g. stem-loop elements stem1 and stem2, form base-pairs with each other, leading to a double stranded nucleic acid sequence comprising an unpaired loop at its terminal ending formed by the short sequence located between stem-loop elements stem1 and stem2 on the consecutive sequence. The unpaired loop thereby typically represents a region of the nucleic acid which is not capable of base pairing with either of these stem-loop elements. The resulting lollipop-shaped structure is a key building block of many RNA secondary structures. The formation of a stem-loop structure is thus dependent on the stability of the resulting stem and loop regions, wherein the first prerequisite is typically the presence of a sequence that can fold back on itself to form a paired double strand. The stability of paired stem-loop elements is determined by the length, the number of mismatches or bulges it contains (a small number of mismatches is typically tolerable, especially in a long double strand), and the base composition of the paired region. In the context of the present invention, optimal loop length is 3-10 bases, more preferably 3 to 8, 3 to 7, 3 to 6 or even more preferably 4 to 5 bases, and most preferably 4 bases.

[0124] Preferably, the at least one histone stem-loop is functionally associated to the ORF. This means that the at least one histone stem-loop is preferably positioned within the artificial nucleic acid molecule such that it is able to exert its function, for example, its function of increasing protein production from the ORF or stabilizing the artificial nucleic acid molecule.

[0125] Preferably, the histone stem-loop is located 3′ to the ORF. For example, the histone stem-loop may be connected to the 3′-end of the ORF directly or via a linker, for example via a stretch of nucleotides, such as 2, 4, 6, 8, 10 etc. nucleotides, e.g. comprising one or more restriction sites, or the histone stem-loop may be located within or between or downstream of other structures located 3′ to the ORF, such as within a 3′UTR element, or between a poly(A) sequence and a poly(C) sequence, or down-stream of a poly(A) and/or a poly(C) sequence, or the histone stem-loop may be located at the 3′-end of the artificial nucleic acid molecule. The term “located at the 3′-end” also includes embodiments, wherein the histone stem-loop is followed in 3′-direction by few nucleotides which remain, e.g., after a restriction enzyme cleavage.

[0126] Preferably, the 5′UTR element and the histone stem-loop are chosen and positioned such that they exert at least an an additive, preferably a synergistic function on protein production from the ORF of the artificial nucleic acid molecule. Preferably, protein production from the ORF is increased at least in an additive, preferably in a synergistic way by the 5′UTR element and the histone stem-loop. Thus, the protein amount of the protein encoded by the ORF, such as a reporter protein, e.g. luciferase, at a certain time point after initiation of expression of the ORF, e.g. after transfection of a test cell line, is at least the same, preferably higher than what would be expected if the protein production increasing effects of the 5′UTR element and the histone stem-loop were purely additive. The additive, preferably synergistic effect may, for example, be determined by the following assay. Four artificial nucleic acid molecules, e.g. mRNAs, comprising an ORF encoding, e.g. a reporter protein such as luciferase, are generated, i.e. (i) lacking a 5′UTR element and a histone stem-loop (E0), (ii) containing a 5′UTR element derived from a 5′UTR of a TOP gene or of a variant thereof (E1), (iii) containing a histone stem-loop (E2), and (iv) containing both the 5′UTR element and the histone stem-loop (E1E2). Expression of the ORF contained in the artificial nucleic acid molecules is initiated, for example, by transfecting a test cell line, such as a mammalian cell line, e.g. HELA cells, or primary cells, e.g. HDF cells. Samples are taken at specific time points after initiation of expression, for example, after 6 hours, 24 hours, 48 hours, and/or 72 hours and the amount of protein produced by expression of the ORF contained in the artificial nucleic acid molecules is measured, for example, by an ELISA assay or a luciferase test, depending on the type of protein encoded by the ORF. The predicted amount of protein at a certain time point after initiation of expression obtained by construct E1E2 if the effects of the 3′UTR element and the 5′UTR element were purely additive (PPA) may be calculated as follows:

$$P P {A}_{x} = ( E {1}_{x} - E {0}_{x} ) + ( E {2}_{x} - E {0}_{x} ) + E {0}_{x} ,$$

[0127] E0 is the amount of protein obtained for the construct E0 (lacking a 5′UTR and a histone stem-loop), E1 is the amount of protein obtained for the construct E1, E2 is the protein amount obtained for the construct E2, and x is the time point after initiation of expression. The effect on increasing protein production is additive if E1E2ₓ=PPAₓ, and synergistic in the sense of the present invention if E1E2ₓ>PPAₓ, wherein E1E2ₓ is the amount of protein obtained from construct E1E2 at time point x. Preferably, E1E2 is at least 1.0, more preferably at least 1.1, more preferably at least 1.3, more preferably at least 1.5, even more preferably at least 1.75 times PPA at a given time point post initiation of expression, such as 24 hours, 48 hours or 72 hours post initiation of expression.

[0128] Thus, in a preferred embodiment, the present invention provides an artificial nucleic acid molecule comprising (a.) at least one 5′UTR element which comprises or consists of a nucleic acid sequence which is derived from the 5′UTR of a TOP gene or which is derived from a variant of the 5′UTR of a TOP geneas described above; (b.) at least one open reading frame (ORF); and (c.) at least one histone stem-loop as described herein, wherein the histone stem-loop and the 5′UTR element act at least additively, preferably synergistically to increase protein production from the ORF, preferably wherein E1E2≥PPA, preferably E1E2 is at least PPA, more preferably E1E2 is at least 1.1 times PPA, more preferably E1E2 is at least 1.3 times PPA, even more preferably wherein E1E2 is at least 1.5 times PPA at a given time point post initiation of expression of the ORF, for example 24 hours, preferably 48 hours post initiation of expression, wherein E1E2 and PPA are as described above.

[0129] Furthermore, it is preferred that the at least one histone stem-loop and the at least one 5′UTR element have an at least additive, preferably a synergistic effect on total protein production from the artificial nucleic acid molecule in a certain time span, such as within 24 hours, 48 hours, or 72 hours post initiation of expression. The additive, preferably the synergistic effect may be determined as described above, with the difference that the area under the curve (AUC) for the amount of protein over time predicted for E1E2 if the effects are additive is compared to the actual AUC measured for E1E2.

[0130] In a preferred embodiment of the present invention, the inventive artificial nucleic acid molecule comprises or codes for (a.) at least one 5′UTR element as described above, (b.) at least one open reading frame; and (c.) at least one histone stem-loop, preferably according to at least one of the following formulae (I) or (II):
[0131] formula (I) (stem-loop sequence without stem bordering elements):

[chemical structure]

[0132] formula (II) (stem-loop sequence with stem bordering elements):

[chemical structure]

wherein:
[0133] stem1 or stem2 bordering element N₁₋₆ is a consecutive sequence of 1 to 6, preferably of 2 to 6, more preferably of 2 to 5, even more preferably of 3 to 5, most preferably of 4 to 5 or 5 N, wherein each N is independently from another selected from a nucleotide selected from A, U, T, G and C, or a nucleotide analogue thereof;
[0134] stem1 [N₀₋₂GN₃₋₅] is reverse complementary or partially reverse complementary with element stem2, and is a consecutive sequence of between 5 to 7 nucleotides;
[0135] wherein N₀₋₂ is a consecutive sequence of 0 to 2, preferably of 0 to 1, more preferably of 1 N, wherein each N is independently from another selected from a nucleotide selected from A, U, T, G and C or a nucleotide analogue thereof;
[0136] wherein N₃₋₅ is a consecutive sequence of 3 to 5, preferably of 4 to 5, more preferably of 4 N, wherein each N is independently from another selected from a nucleotide selected from A, U, T, G and C or a nucleotide analogue thereof, and
[0137] wherein G is guanosine or an analogue thereof, and may be optionally replaced by a cytidine or an analogue thereof, provided that its complementary nucleotide cytidine in stem2 is replaced by guanosine;
[0138] loop sequence [N₀₋₄(U/T)N₀₋₄] is located between elements stem1 and stem2, and is a consecutive sequence of 3 to 5 nucleotides, more preferably of 4 nucleotides;
[0139] wherein each N₃₋₅ is independent from another a consecutive sequence of 0 to 4, preferably of 1 to 3, more preferably of 1 to 2 N, wherein each N is independently from another selected from a nucleotide selected from A, U, T, G and C or a nucleotide analogue thereof; and wherein U/T represents uridine, or optionally thymidine;
[0140] stem2 [N₃₋₅CN₀₋₂] is reverse complementary or partially reverse complementary with element stem1, and is a consecutive sequence of between 5 to 7 nucleotides;
[0141] wherein N₃₋₅ is a consecutive sequence of 3 to 5, preferably of 4 to 5, more preferably of 4 N, wherein each N is independently from another selected from a nucleotide selected from A, U, T, G and C or a nucleotide analogue thereof;
[0142] wherein N₀₋₂ is a consecutive sequence of 0 to 2, preferably of 0 to 1, more preferably of 1 N, wherein each N is independently from another selected from a nucleotide selected from A, U, T, G or C or a nucleotide analogue thereof; and
[0143] wherein C is cytidine or an analogue thereof, and may be optionally replaced by a guanosine or an analogue thereof provided that its complementary nucleotide guanosine in stem1 is replaced by cytidine;
[0144] wherein stem1 and stem2 are capable of base pairing with each other forming a reverse complementary sequence, wherein base pairing may occur between stem1 and stem2, e.g. by Watson-Crick base pairing of nucleotides A and U/T or G and C or by non-Watson-Crick base pairing e.g. wobble base pairing, reverse Watson-Crick base pairing, Hoogsteen base pairing, reverse Hoogsteen base pairing or are capable of base pairing with each other forming a partially reverse complementary sequence, wherein an incomplete base pairing may occur between stem1 and stem2, on the basis that one ore more bases in one stem do not have a complementary base in the reverse complementary sequence of the other stem.

[0145] In the above context, a wobble base pairing is typically a non-Watson-Crick base pairing between two nucleotides. The four main wobble base pairs in the present context, which may be used, are guanosine-uridine, inosine-uridine, inosine-adenosine, inosine-cytidine (G-U/T, I-U/T, I-A and I-C) and adenosine-cytidine (AC).

[0146] Accordingly, in the context of the present invention, a wobble base is a base, which forms a wobble base pair with a further base as described above. Therefore, non-Watson-Crick base pairing, e.g. wobble base pairing, may occur in the stem of the histone stem-loop structure according to the present invention.

[0147] In the above context, a partially reverse complementary sequence comprises maximally two, preferably only one mismatch in the stem-structure of the stem-loop sequence formed by base pairing of stem1 and stem2. In other words, stem1 and stem2 are preferably capable of (full) base pairing with each other throughout the entire sequence of stem1 and stem2 (100% of possible correct Watson-Crick or non-Watson-Crick base pairings), thereby forming a reverse complementary sequence, wherein each base has its correct Watson-Crick or non-Watson-Crick base pendant as a complementary binding partner. Alternatively, stem1 and stem2 are preferably capable of partial base pairing with each other throughout the entire sequence of stem1 and stem2, wherein at least about 70%, 75%, 80%, 85%, 90%, or 95% of the 100% possible correct Watson-Crick or non-Watson-Crick base pairings are occupied with the correct Watson-Crick or non-Watson-Crick base pairings and at most about 30%, 25%, 20%, 15%, 10%, or 5% of the remaining bases are unpaired.

[0148] According to a preferred embodiment of the invention, the at least one histone stem-loop sequence (with stem bordering elements) of the inventive nucleic acid sequence as defined herein comprises a length of about 15 to about 45 nucleotides, preferably a length of about 15 to about 40 nucleotides, preferably a length of about 15 to about 35 nucleotides, preferably a length of about 15 to about 30 nucleotides and even more preferably a length of about 20 to about 30 and most preferably a length of about 24 to about 28 nucleotides.

[0149] Furthermore, the at least one histone stem-loop sequence (without stem bordering elements) of the inventive artificial nucleic acid molecule as defined herein may comprise a length of about 10 to about 30 nucleotides, preferably a length of about 10 to about 20 nucleotides, preferably a length of about 12 to about 20 nucleotides, preferably a length of about 14 to about 20 nucleotides and even more preferably a length of about 16 to about 17 and most preferably a length of about 16 nucleotides.

[0150] Preferably, the inventive artificial nucleic acid molecule may comprise or code for (a.) at least one 5′UTR element as described above; at least one open reading frame; and (c.) at least one histone stem-loop sequence according to at least one of the following specific formulae (Ia) or (IIa): formula (Ia) (stem-loop sequence without stem bordering elements):

[chemical structure]

[0151] formula (IIa) (stem-loop sequence with stem bordering elements):

[chemical structure]

[0152] wherein N, C, G, T and U are as defined above.

[0153] Preferably, the inventive artificial nucleic acid molecule may comprise or code for (a.) at least one 5′UTR element as described above; at least one open reading frame; and (c.) at least one histone stem-loop sequence according to at least one of the following specific formulae (Ib) or (IIb):
[0154] formula (Tb) (stem-loop sequence without stem bordering elements):

[chemical structure]

[0155] formula (IIb) (stem-loop sequence with stem bordering elements):

[chemical structure]

[0156] wherein N, C, G, T and U are as defined above.

[0157] Preferably, the inventive artificial nucleic acid molecule may comprise or code for (a.) at least one 5′UTR element as described above; at least one open reading frame; and (c.) at least one histone stem-loop sequence according to at least one of the following specific formulae (Ic) to (Ih) or (IIc) to (IIh), shown alternatively in its stem-loop structure and as a linear sequence representing histone stem-loop sequences as generated according to Example 1:

```
formula (Ic): (metazoan and protozoan histone
stem-loop consensus sequence without stem
bordering elements):
          N U
        N N
          N-N
          N-N
          N-N
          N-N
          G-C
          N-N (stem-loop structure)
(SEQ ID NO: 1391)
NGNNNNNNUNNNNNCN
(linear sequence)
formula (IIc): (metazoan and protozoan histone
stem-loop consensus sequence with stem bordering
elements):
            N U
          N N
            N-N
            N-N
            N-N
            N-N
            G-C
N*N*NNNN-NNNN*N*N* (stem-loop structure)
(SEQ ID NO: 1392)
N*N*NNNNGNNNNNNUNNNNNCNNNN*N*N*
(linear sequence)
formula (Id): (without stem bordering elements)
          N U
        N N
          N-N
          N-N
          N-N
          N-N
          C-G
          N-N (stem-loop structure)
(SEQ ID NO: 1393)
NCNNNNNNUNNNNNGN
(linear sequence)
formula (IId): (with stem bordering elements)
            N U
          N N
            N-N
            N-N
            N-N
            N-N
            C-G
N*N*NNNN-NNNN*N*N* (stem-loop structure)
(SEQ ID NO: 1394)
N*N*NNNNCNNNNNNUNNNNNGNNNN*N*N*
(linear sequence)
formula (Ie): (protozoan histone stem-loop
consensus sequence without stem bordering
elements)
          N U
        N N
          N-N
          N-N
          N-N
          N-N
          G-C
          D-H (stem-loop structure)
(SEQ ID NO: 1395)
DGNNNNNNUNNNNNCH
(linear sequence)
formula (IIe): (protozoan histone stem-loop
consensus sequence with stem bordering
elements)
            N U
          N N
            N-N
            N-N
            N-N
            N-N
            G-C
N*N*NNND-HNNN*N*N* (stem-loop structure)
(SEQ ID NO: 1396)
N*N*NNNDGNNNNNNUNNNNNCHNNN*N*N*
(linear sequence)
formula (If): (metazoan histone stem-loop
consensus sequence without stem bordering
elements)
          N U
        N N
          Y-V
          Y-N
          B-D
          N-N
          G-C
          N-N (stem-loop structure)
(SEQ ID NO: 1397)
NGNBYYNNUNVNDNCN
(linear sequence)
formula (IIf): (metazoan histone stem-loop
consensus sequence with stem bordering
elements)
            N U
          N N
            Y-V
            Y-N
            B-D
            N-N
            G-C
N*N*NNNN-NNNN*N*N* (stem-loop structure)
(SEQ ID NO: 1398)
N*N*NNNNGNBYYNNUNVNDNCNNNN*N*N*
(linear sequence)
formula (Ig): (vertebrate histone stem-loop
consensus sequence without stem bordering
elements)
          N U
        D H
          Y-A
          Y-B
          Y-R
          H-D
          G-C
          N-N (stem-loop structure)
(SEQ ID NO: 1399)
NGHYYYDNUHABRDCN
(linear sequence)
formula (IIg): (vertebrate histone stem-loop
consensus sequence with stem bordering
elements)
          D H
            Y-A
            Y-B
            Y-R
            H-D
            G-C
N*N*HNNN-NNNN*N*H* (stem-loop structure)
(SEQ ID NO: 1400)
N*N*HNNNGHYYYDNUHABRDCNNNN*N*H*
(linear sequence)
formula (Ih): (human histone stem-loop
consensus sequence (Homo sapiens)
without stem bordering elements)
        Y U
      D H
        U-A
        C-S
        Y-R
        H-R
        G-C
        D-C (stem-loop structure)
(SEQ ID NO: 1401)
DGHYCUDYUHASRRCC
(linear sequence)
formula (IIh): (human histone stem-loop
consensus sequence (Homo sapiens) with
stem bordering elements)
            Y U
          D H
            U-A
            C-S
            Y-R
            H-R
            G-C
N*H*AAHD-CVHB*N*H* (stem loop structure)
(SEQ ID NO: 1402)
N*H*AAHDGHYCUDYUHASRRCCVHB*N*H*
(linear sequence)
```

wherein in each of above formulae (Ic) to (Ih) or (IIc) to (IIh):
[0158] N, C, G, A, T and U are as defined above;
[0159] each U may be replaced by T;
[0160] each (highly) conserved G or C in the stem elements 1 and 2 may be replaced by its complementary nucleotide base C or G, provided that its complementary nucleotide in the corresponding stem is replaced by its complementary nucleotide in parallel; and/or
[0161] G, A, T, U, C, R, Y, M, K, S, W, H, B, V, D, and N are nucleotide bases as defined in the following Table:

| abbreviation | Nucleotide bases | remark |
|---|---|---|
| G | G | Guanine |
| A | A | Adenine |
| T | T | Thymine |
| U | U | Uracile |
| C | C | Cytosine |
| R | G or A | Purine |
| Y | T/U or C | Pyrimidine |
| M | A or C | Amino |
| K | G or T/U | Keto |
| S | G or C | Strong (3H bonds) |
| W | A or T/U | Weak (2H bonds) |
| H | A or C or T/U | Not G |
| B | G or T/U or C | Not A |
| V | G or C or A | Not T/U |
| D | G or A or T/U | Not C |
| N | G or C or T/U or A | Any base |
| * | Present or not | Base may be present or not |

[0162] In this context, it is particularly preferred that the histone stem-loop sequence according to at least one of the formulae (I) or (Ia) to (Ih) or (II) or (IIa) to (IIh) of the present invention is selected from a naturally occurring histone stem-loop sequence, more particularly preferred from protozoan or metazoan histone stem-loop sequences, and even more particularly preferred from vertebrate and mostly preferred from mammalian histone stem-loop sequences especially from human histone stem-loop sequences.

[0163] Further preferably, the histone stem-loop sequence according to at least one of the specific formulae (I) or (Ia) to (Ih) or (II) or (IIa) to (IIh) of the present invention is a histone stem-loop sequence comprising at each nucleotide position the most frequently occurring nucleotide, or either the most frequently or the second-most frequently occurring nucleotide of naturally occurring histone stem-loop sequences in metazoa and protozoa (FIG. 1), protozoa (FIG. 2), metazoa (FIG. 3), vertebrates (FIG. 4) and humans (FIG. 5) as shown in FIGS. 1-5. In this context, it is particularly preferred that at least 80%, preferably at least 85%, or most preferably at least 90% of all nucleotides correspond to the most frequently occurring nucleotide of naturally occurring histone stem-loop sequences.

[0164] Further preferably, the histone stem-loop sequence according to at least one of the specific formulae (I) or (Ia) to (Ih) of the present invention may be selected from following histone stem-loop sequences or corresponding RNA sequences (without stem-bordering elements) representing histone stem-loop sequences as generated according to Example 1:

VGYYYYHHTHRVVRCB
(SEQ ID NO: 1403 according to formula (Ic))
SGYYYTTYTMARRRCS
(SEQ ID NO: 1404 according to formula (Ic))
SGYYCTTTTMAGRRCS
(SEQ ID NO: 1405 according to formula (Ic))
DGNNNBNNTHVNNNCH
(SEQ ID NO: 1406 according to formula (Ie))
RGNNNYHBTHRDNNCY
(SEQ ID NO: 1407 according to formula (Ie))
RGNDBYHYTHRDHNCY
(SEQ ID NO: 1408 according to formula (Ie))
VGYYYTYHTHRVRRCB
(SEQ ID NO: 1409 according to formula (If))
SGYYCTTYTMAGRRCS
(SEQ ID NO: 1410 according to formula (If))
SGYYCTTTTMAGRRCS
(SEQ ID NO: 1411 according to formula (If))
GGYYCTTYTHAGRRCC
(SEQ ID NO: 1412 according to formula (Ig))
GGCYCTTYTMAGRGCC
(SEQ ID NO: 1413 according to formula (Ig))
GGCTCTTTTMAGRGCC
(SEQ ID NO: 1414 according to formula (Ig))
DGHYCTDYTHASRRCC
(SEQ ID NO: 1415 according to formula (Ih))
GGCYCTTTTHAGRGCC
(SEQ ID NO: 1416 according to formula (Ih))
GGCYCTTTTMAGRGCC
(SEQ ID NO: 1417 according to formula (Ih))

[0165] Furthermore, in this context, following histone stem-loop sequences (with stem bordering elements) as generated according to Example 1 according to one of specific formulae (II) or (IIa) to (IIh) and the corresponding RNA sequences are particularly preferred:

H*H*HHVVGYYYYHHTHRVVRCBVHH*N*N*
(SEQ ID NO: 1418 according to formula (IIc))
M*H*MHMSGYYYTTYTMARRRCSMCH*H*H*
(SEQ ID NO: 1419 according to formula (IIc))
M*M*MMMSGYYCTTTTMAGRRCSACH*M*H*
(SEQ ID NO: 1420 according to formula (IIc))
N*N*NNNDGNNNBNNTHVNNNCHNHN*N*N*
(SEQ ID NO: 1421 according to formula (IIe))
N*N*HHNRGNNNYHBTHRDNNCYDHH*N*N*
(SEQ ID NO: 1422 according to formula (IIe))
N*H*HHVRGNDBYHYTHRDHNCYRHH*H*H*
(SEQ ID NO: 1423 according to formula (IIe))
H*H*MHMVGYYYTYHTHRVRRCBVMH*H*N*
(SEQ ID NO: 1424 according to formula (IIf))
M*M*MMMSGYYCTTYTMAGRRCSMCH*H*H*
(SEQ ID NO: 1425 according to formula (IIf))
M*M*MMMSGYYCTTTTMAGRRCSACH*M*H*
(SEQ ID NO: 1426 according to formula (IIf))
H*H*MAMGGYYCTTYTHAGRRCCVHN*N*M*
(SEQ ID NO: 1427 according to formula (IIg))
H*H*AAMGGCYCTTYTMAGRGCCVCH*H*M*
(SEQ ID NO: 1428 according to formula (IIg))
M*M*AAMGGCTCTTTTMAGRGCCMCY*M*M*
(SEQ ID NO: 1429 according to formula (IIg))
N*H*AAHDGHYCTDYTHASRRCCVHB*N*H*
(SEQ ID NO: 1430 according to formula (IIh))
H*H*AAMGGCYCTTTTHAGRGCCVMY*N*M*
(SEQ ID NO: 1431 according to formula (IIh))
H*M*AAAGGCYCTTTTMAGRGCCRMY*H*M*
(SEQ ID NO: 1432 according to formula (IIh))

[0166] A particular preferred histone stem-loop sequence is the sequence according to SEQ ID NO: 1433 (CAAAGGCTCTTTTCAGAGCCACCA) or the corresponding RNA sequence.

[0167] Thus, in a particularly preferred embodiment, the artificial nucleic acid molecule according to the present invention comprises (a.) at least one 5′UTR element as described above; (b.) at least one open reading frame; and (c.) at least one histone-stem loop which comprises or consists of a sequence having a sequence identity of at least about 75%, preferably of at least about 80%, preferably at least about 85%, more preferably at least about 90%, even more preferably at least about 50 95% to the sequence according to SEQ ID NO. 1433 or the corresponding RNA sequence, wherein preferably positions 6, 13 and 20 of the sequence having a sequence identity of at least about 75%, preferably of at least about 80%, preferably at least about 85%, more preferably at least about 90%, even more preferably at least about 95% to the sequence according to SEQ ID NO. 1433 or the corresponding RNA sequence are conserved, i.e. are identical to the nucleotides at positions 6, 13 and 20 of SEQ ID NO. 1433.

[0168] According to a further preferred embodiment, the inventive artificial nucleic acid molecule comprises or codes for at least one histone stem-loop sequence showing at least about 80%, preferably at least about 85%, more preferably at least about 90%, or even more preferably at least about 95% sequence identity with the not to 100% conserved nucleotides in the histone stem-loop sequences according to at least one of specific formulae (I) or (Ia) to (Ih) or (II) or (IIa) to (IIh) or with a naturally occurring histone stem-loop sequence.

[0169] Furthermore, the artificial nucleic acid molecule according to the present invention may comprise more than one histone stem-loop as described herein. For example, the artificial nucleic acid molecule according to the present invention may comprise one, two, three, four or more histone stem-loops, wherein the individual histone stem-loops may be the same or they may be different. For example, the artificial nucleic acid molecule according to the present invention may comprise two histone stem-loops, wherein each histone stem-loop sequence may be selected from the group consisting of SEQ ID NOs. 1391-1433.

[0170] In a particularly preferred embodiment, the present invention provides an artificial nucleic acid molecule comprising:
[0171] a. at least one 5′-untranslated region element (5′UTR element) which comprises or consists of a nucleic acid sequence which is derived from the 5′UTR of a TOP gene or which is derived from a variant of the 5′UTR of a TOP gene as described above;
[0172] b. at least one open reading frame (ORF); and
[0173] c. at least one histone stem-loop, wherein preferably the sequence of the histone stem-loop is selected from the group consisting of sequences according to formulae (I) or (Ia) to (Ih) or (II) or (IIa) to (IIh), such as a sequence selected from the group consisting of SEQ ID NOs: 1391-1433, preferably from the group consisting of SEQ ID NOs. 1403-1433.

[0174] Thus, for example, the artificial nucleic acid molecule according to the present invention may comprise at least one 5′UTR element which is derived from the 5′UTR of a sequence selected from the group consisting of SEQ ID NOs. 1-1363, SEQ ID NO. 1435, SEQ ID NO. 1461 or SEQ ID NO. 1462, from a homolog thereof, from a variant thereof, or from a corresponding RNA sequence, such as a 5′UTR element which comprises or consists of a nucleic acid sequence which has an identity of at least about 40%, preferably of at least about 50%, preferably of at least about 60%, preferably of at least about 70%, more preferably of at least about 80%, more preferably of at least about 90%, even more preferably of at least about 95%, even more preferably of at least about 99% to a nucleic acid sequence extending from nucleotide position 5 to the nucleotide position immediately 5′ to the start codon (located at the 3′ end of the sequences), e.g. the nucleotide position immediately 5′ to the ATG sequence, of a nucleic acid sequence selected from SEQ ID NOs. 1-1363, SEQ ID NO. 1435, SEQ ID NO. 1461 or SEQ ID NO. 1462, or a corresponding RNA sequence, or at least one 5′UTR element which comprises or consists of a fragment of a nucleic acid sequence which has an identity of at least about 40%, preferably of at least about 50%, preferably of at least about 60%, preferably of at least about 70%, more preferably of at least about 80%, more preferably of at least about 90%, even more preferably of at least about 95%, even more preferably of at least about 99% to a nucleic acid sequence extending from nucleotide position 5 to the nucleotide position immediately 5′ to the start codon (located at the 3′ end of the sequences), e.g. the nucleotide position immediately 5′ to the ATG sequence, of a nucleic acid sequence selected from SEQ ID NOs. 1-1363, SEQ ID NO. 1435, SEQ ID NO. 1461 or SEQ ID NO. 1462, or a corresponding RNA sequence, preferably lacking the 5′TOP motif, wherein, preferably, the fragment is as described above, i.e. being a continuous stretch of nucleotides representing at least 20% etc. of the full-length 5′UTR the fragment is derived from, (b.) at least one open reading frame, and (c.) at least one histone stem-loop sequence selected from the group consisting of SEQ ID NOs: 1391-1433, preferably from the group consisting of SEQ ID NOs: 1403-1433, preferably wherein the at least one histone histone-stem loop comprises or consists of a sequence having a sequence identity of at least about 75%, preferably of at least about 80%, preferably at least about 85%, more preferably at least about 90%, even more preferably at least about 95% to the sequence according to SEQ ID NO. 1433 or the corresponding RNA sequence, wherein preferably positions 6, 13 and 20 of the sequence having a sequence identity of at least about 75%, preferably of at least about 80%, preferably at least about 85%, more preferably at least about 90%, even more preferably at least about 95% to the sequence according to SEQ ID NO. 1433 or the corresponding RNA sequence are conserved, i.e. are identical to the nucleotides at positions 6, 13 and 20 of SEQ ID NO. 1433.

[0175] Furthermore, for example, the artificial nucleic acid molecule according to the present invention may comprise at least one 5′UTR element which comprises or consists of a nucleic acid sequence which is derived from a 5′UTR of a TOP gene encoding a ribosomal protein or from a variant of a 5′UTR of a TOP gene encoding a ribosomal protein, e.g. which comprises or consists of a nucleic acid sequence which is derived from a 5′UTR of a nucleic acid sequence according to any of SEQ ID NOs: 170, 232, 244, 259, 1284, 1285, 1286, 1287, 1288, 1289, 1290, 1291, 1292, 1293, 1294, 1295, 1296, 1297, 1298, 1299, 1300, 1301, 1302, 1303, 1304, 1305, 1306, 1307, 1308, 1309, 1310, 1311, 1312, 1313, 1314, 1315, 1316, 1317, 1318, 1319, 1320, 1321, 1322, 1323, 1324, 1325, 1326, 1327, 1328, 1329, 1330, 1331, 1332, 1333, 1334, 1335, 1336, 1337, 1338, 1339, 1340, 1341, 1342, 1343, 1344, 1346, 1347, 1348, 1349, 1350, 1351, 1352, 1353, 1354, 1355, 1356, 1357, 1358, 1359, or 1360;, a corresponding RNA sequence, a homolog thereof, or a variant thereof as described herein, and at least one histone stem-loop sequence selected from the group consisting of SEQ ID NOs: 1391-1433, preferably from the group consisting of SEQ ID NOs: 1403-1433, preferably wherein the at least one histone-stem loop comprises or consists of a sequence having a sequence identity of at least about 75%, preferably of at least about 80%, preferably at least about 85%, more preferably at least about 90%, even more preferably at least about 95% to the sequence according to SEQ ID NO. 1433 or the corresponding RNA sequence, wherein preferably positions 6, 13 and 20 of the sequence having a sequence identity of at least about 75%, preferably of at least about 80%, preferably at least about 85%, more preferably at least about 90%, even more preferably at least about 95% to the sequence according to SEQ ID NO. 1433 or the corresponding RNA sequence are conserved, i.e. are identical to the nucleotides at positions 6, 13 and 20 of SEQ ID NO. 1433.

[0176] In a further embodiment, the artificial nucleic acid molecule according to the present invention may comprise at least one 5′UTR element which comprises or consists of a nucleic acid sequence which is derived from a 5′UTR of a TOP gene encoding a ribosomal Large protein or from a variant of a 5′UTR of a TOP gene encoding a ribosomal Large protein, e.g. which comprises or consists of a nucleic acid sequence which is derived from a 5′UTR of a nucleic acid sequence according to any of SEQ ID NOs: 67, 259, 1284-1318, 1344, 1346, 1348-1354, 1357, 1461 and 1462, a corresponding RNA sequence, a homolog thereof, or a variant thereof as described herein, and at least one histone stem-loop sequence selected from the group consisting of SEQ ID NOs: 1391-1433, preferably from the group consisting of SEQ ID NOs: 1403-1433, preferably wherein the at least one histone histone-stem loop comprises or consists of a sequence having a sequence identity of at least about 75%, preferably of at least about 80%, preferably at least about 85%, more preferably at least about 90%, even more preferably at least about 95% to the sequence according to SEQ ID NO. 1433 or the corresponding RNA sequence, wherein preferably positions 6, 13 and 20 of the sequence having a sequence identity of at least about 75%, preferably of at least about 80%, preferably at least about 85%, more preferably at least about 90%, even more preferably at least about 95% to the sequence according to SEQ ID NO. 1433 or the corresponding RNA sequence are conserved, i.e. are identical to the nucleotides at positions 6, 13 and 20 of SEQ ID NO. 1433.

[0177] As preferred example, the artificial nucleic acid molecule according to the present invention may comprise a 5′UTR element which comprises or consists of a nucleic acid sequence which has an identity of at least about 90%, preferably of at least about 95%, even more preferably of at least about 99% to the nucleic acid sequence according to SEQ ID NO: 1368 or SEQ ID NOs: 1452-1460 and a histone stem-loop sequence selected from the group consisting of SEQ ID NOs: 1403-1433, e.g. according to SEQ ID NO: 1433, or wherein the histone histone-stem loop comprises or consists of a sequence having a sequence identity of about 90%, even more preferably at least about 95% to the sequence according to SEQ ID NO. 1433 or the corresponding RNA sequence, wherein positions 6, 13 and 20 of the sequence having a sequence identity of at least about 90%, even more preferably at least about 95% to the sequence according to SEQ ID NO. 1433 or the corresponding RNA sequence are conserved, i.e. are identical to the nucleotides at positions 6, 13 and 20 of SEQ ID NO. 1433.

[0178] In some embodiments, the histone stem-loop sequence according to component (c.) is not derived from a mouse histone gene, e.g. from mouse histone gene H2A614. In one embodiment, the artificial nucleic acid molecule of the invention neither contains a mouse histone stem-loop sequence nor contains mouse histone gene H2A614. Furthermore, in one embodiment, the inventive artificial nucleic acid molecule does not contain a stem-loop processing signal, more specifically, a mouse histone processing signal and, most specifically, does not contain mouse histone stem-loop processing signal H2kA614. Also, in one embodiment, the inventive nucleic acid molecule may contain at least one mammalian histone gene. However, in one embodiment, the at least one mammalian histone gene is not Seq. ID No. 7 of WO 01/12824.

[0179] Preferably, the inventive artificial nucleic acid molecule comprises no histone downstream element (HDE).

[0180] The term “histone downstream element (HDE)” refers to a purine-rich polynucleotide stretch of about 15 to 20 nucleotides 3′ of naturally occurring stem-loops, which represents the binding site for the U7 snRNA involved in processing of histone pre-mRNA into mature histone mRNA. For example in sea urchins the HDE is CAAGAAAGA (Dominski, Z. and W. F. Marzluff (2007), Gene 396(2): 373-90).

[0181] Preferably, the artificial nucleic acid molecule according to the present invention further comprises a poly(A) sequence or a poly(A) signal.

[0182] Therefore, it is particularly preferred that the inventive artificial nucleic acid molecule comprises or codes for (a.) at least one 5′UTR element as described above, (b.) at least one open reading frame, preferably encoding a peptide or protein; (c.) at least one histone stem-loopas described herein, and (d.) a poly(A) sequence or a polyadenylation signal.

[0183] A polyadenylation signal is defined herein as a signal which conveys polyadenylation to a (transcribed) mRNA by specific protein factors (e.g. cleavage and polyadenylation specificity factor (CPSF), cleavage stimulation factor (CstF), cleavage factors I and II (CF I and CF II), poly(A) polymerase (PAP)).

[0184] Preferably, the polyadenylation signal comprises the consensus sequence NN(U/T)ANA, with N=A or U, preferably AA(U/T)AAA or A(U/T)(U/T)AAA. Such consensus sequence may be recognised by most animal and bacterial cell-systems, for example by the polyadenylation-factors, such as cleavage/polyadenylation specificity factor (CPSF) cooperating with CstF, PAP, PAB2, CFI and/or CFII. The polyadenylation signal is preferably located within the artificial nucleic acid molecule such that the above described machinery is able to effect polyadenylation of the artificial nucleic acid molecule. For example, the polyadenylation signal may be located less than about 50 nucleotides, more preferably less than about 30 nucleotides, most preferably less than about 25 nucleotides, for example 21 nucleotides, upstream of the 3′-end of the artificial nucleic acid molecule.

[0185] Additionally or alternatively to the polyadenylation signal, in some embodiments, the artificial nucleic acid molecule according to the present invention may further comprise a poly(A) sequence. The length of the poly(A) sequence may vary. For example, the poly(A) sequence may have a length of about 20 adenine nucleotides up to about 400 adenine nucleotides, such as about adenine nucleotides up to about 300 adenine nucleotides, preferably about 40 to about 200 adenine nucleotides, more preferably about 50 to about 100 adenine nucleotides, such as about 60, 70, 80, 90 or 100 adenine nucleotides. The term about refers to a deviation of ±10%.

[0186] The poly(A) sequence is preferably located 3′ to the ORF. For example, the poly(A) sequence may be connected to the 3′-end of the ORF directly or via a linker, for example via a stretch of nucleotides, such as 2, 4, 6, 8, 10, 20 etc. nucleotides, such as via a linker of 1-50, preferably 1-20 nucleotides, e.g. comprising one or more restriction sites, or the poly(A) sequence may be located within or between or downstream of other structures located 3′ to the ORF, such as between a 3′UTR element and a poly(C) sequence, or down-stream of a 3′UTR element and/or a poly(C) sequence, or the poly(A) sequence may be located at the 3′-end of the artificial nucleic acid molecule. The term “located at the 3′-end” also includes embodiments, wherein the poly(A) sequence is followed in 3′-direction by few nucleotides which remain, e.g. after a restriction enzyme cleavage.

[0187] It is particularly preferred that the inventive artificial nucleic acid molecule comprises in 5′- to 3′-direction or codes in 5′- to 3′-direction for
[0188] (a.) at least one 5′UTR element derived from a TOP gene as described herein;
[0189] (b.) at least one open reading frame, preferably encoding a peptide or protein;
[0190] (c.) at least one histone stem-loop, optionally without a histone downstream element 3′ to the histone stem-loop, as described herein; and
[0191] (d.) a poly(A) sequence and/or a polyadenylation signal.

[0192] In another particularly preferred embodiment, the inventive nucleic acid molecule according to the present invention comprises in 5′- to 3′-direction or codes in 5′- to 3′-direction for:
[0193] (a.) at least one 5′UTR element derived from a TOP gene as described above;
[0194] (b.) at least one open reading frame, preferably encoding a peptide or protein;
[0195] (d.) a poly(A) sequence; and
[0196] (c.) at least one histone stem-loop as described herein.

[0197] Thus, the poly(A) sequence and the histone stem-loop of an artificial nucleic acid molecule according to the present invention may be positioned in any desired order from 5′ to 3′. Particularly, the poly(A) sequence may be located 5′ as well as 3′ of the histone stem-loop.

[0198] Accordingly, in one embodiment, the artificial nucleic acid molecule according to the present invention comprises
[0199] (a.) at least one 5′-untranslated region element (5′UTR element) which comprises or consists of a nucleic acid sequence which is derived from the 5′UTR of a TOP gene or which is derived from a variant of the 5′UTR of a TOP gene;
[0200] (b.) at least one open reading frame (ORF);
[0201] (c.) a histone stem-loop; and
[0202] (d.) a poly(A) sequence and/or a polyadenylation signal, wherein the poly(A) sequence is located 5′ or 3′ of the histone stem-loop.

[0203] In a further preferred embodiment, the artificial nucleic acid molecule according to the present invention further comprises a poly(C) sequence. A poly(C) sequence in the context of the present invention preferably consists of about 10 to about 200 cytidine nucleotides, more preferably of about 10 to about 100 cytidine nucleotides, more preferably of about 10 to about 50 cytidine nucleotides, even more preferably of about 20 to about 40 cytidine nucleotides, such as about 20, about 25, about 30, about 35, about 40, preferably about 30 cytidine nucleotides. The poly(C) sequence is preferably located 3′ to the ORF of the artificial nucleic acid molecule. For example, the poly(C) sequence may be connected to the 3′-end of the ORF directly or via a linker of a stretch of nucleotides, such as 2, 4, 6, 8, 10, 20 etc. nucleotides, such as via a linker of 1-50, preferably of 1-20 nucleitides, e.g. comprising one or more restriction sites, or the poly(C) sequence may be located within, between or downstream of any other structures located 3′ to the ORF. For example, the poly(C) sequence may be part of a 3′UTR element or may be located between a poly(A) sequence and a histone stem-loop, or the poly(C) sequence may be located at the 3′-end of the artificial nucleic acid molecule. The term “located at the 3′-end” also includes embodiments, wherein the poly(C) sequence is followed in 3′-direction by a few nucleotides which remain, e.g., after a restriction enzyme cleavage. In a particularly preferred embodiment, the poly(C) sequence is located between a poly(A) sequence and a histone stem-loop.

[0204] In a particularly preferred embodiment, the poly(C) sequence is located 5′ to the histone stem-loop.

[0205] Thus, in a particularly preferred embodiment, the artificial nucleic acid molecule according to the present application comprises the structure 5′-[ORF]-[optional linker]-[3′UTR element]-[optional linker]-[poly(A) sequence]-[optional linker]-[poly(C) sequence]-[optional linker]-[histone stem-loop]-3′, wherein the optional linkers may be independently of each other present or absent and may be a stretch of 1-50 nucleotides, e.g. comprising one or more restriction sites.

[0206] In a further embodiment, the artificial nucleic acid molecule according to the present invention further comprises a 3′UTR element. Thus, in some embodiments, the artificial nucleic acid molecule according to the present invention may comprise at least one 5′UTR element as described above, at least one open reading frame, at least one histone stem-loop as described herein and at least one 3′UTR element as described herein. Furthermore, in some embodiments, the artificial nucleic acid molecule according to the present invention may comprise at least one 5′UTR element as described above, at least one open reading frame, at least one histone stem-loop as described herein, at least one 3′UTR element as described herein, and a poly(A) sequence and/or a polyadenylation signal as described herein. In some embodiments, the histone stem-loop may be part of the 3′UTR element.

[0207] The term ‘3′UTR element’ refers to a nucleic acid sequence which comprises or consists of a nucleic acid sequence that is derived from a 3′UTR or from a variant of a 3′UTR. A 3′UTR element in the sense of the present invention may represent the 3′UTR of an mRNA, e.g., in the event that the artificial nucleic acid molecule is an mRNA, or it may represent a sequence in a nucleic acid construct, such as a vector construct, that when transcribed represents the 3′UTR of the transcription product, such as the mRNA. Thus, in the sense of the present invention, preferably, a 3′UTR element may be the 3′UTR of an mRNA, preferably of an artificial mRNA, or it may be the transcription template for a 3′UTR of an mRNA. Thus, a 3′UTR element preferably is a nucleic acid sequence which corresponds to the 3′UTR of an mRNA, preferably to the 3′UTR of an artificial mRNA, such as an mRNA obtained by transcription of a genetically engineered vector construct. Preferably, the 3′UTR element fulfils the function of a 3′UTR or encodes a sequence which fulfils the function of a 3′UTR. The term ‘3UTR element’ furthermore refers to a fragment or part of a 3′UTR of an artificial nucleic acid sequence, such as an artificial mRNA, or which codes for a part or fragment of a 3′UTR of an artificial nucleic acid molecule. This means that the 3′UTR element in the sense of the present invention may be comprised in the 3′UTR of an artificial nucleic acid sequence, such as an artificial mRNA, or which codes for a 3′UTR of an artificial nucleic acid molecule.

[0208] In the context of the present invention, the 3′UTR element may be derived from any 3′UTR of a gene or from a variant thereof, such as from a 3′UTR which is naturally associated with the ORF of the artificial nucleic acid molecule according to the present invention or any other 3′UTR of a naturally occurring gene or of a variant thereof.

[0209] Preferably, the 3′UTR element is functionally linked to the ORF. This means preferably that the 3′UTR element is associated with the ORF such that it may exert a function, such as a stabilizing function on the expression of the ORF or a stabilizing function on the artificial nucleic acid molecule. Preferably, the ORF and the 3′UTR element are associated in 5′->3′ direction. Thus, preferably, the artificial nucleic acid molecule comprises the structure 5′-ORF-(optional)linker-3′UTR element-3′, wherein the linker may be present or absent. For example, the linker may be one or more nucleotides, such as a stretch of 1-50 or 1-20 nucleotides, e.g., comprising or consisting of one or more restriction enzyme recognition sites (restriction sites).

[0210] Preferably, the at least one 5′UTR element and the at least one 3′UTR element are functionally linked to the ORF. This means preferably that the 5′UTR element and the 3′UTR element are associated with the ORF such that they may exert a function, preferably in an additive, more preferably in a synergistic manner, such as a stabilizing function on the expression of the ORF, a protein production increasing function for the protein encoded by the ORF, or a stabilizing function on the artificial nucleic acid molecule. Preferably, the 5′UTR element, the ORF, and the 3′UTR element are associated in 5′->3′ direction. Thus, preferably, the artificial nucleic acid molecule comprises the structure 5′-5′UTR element-(optional)linker-ORF-(optional)linker-3′UTR element-3′, wherein the linker may be present or absent. For example, the linker may be one or more nucleotides, such as a stretch of 1-50 or 1-20 nucleotides, e.g., comprising or consisting of one or more restriction enzyme recognition sites (restriction sites).

[0211] In a particularly preferred embodiment, the 5′UTR element and the 3′UTR element are heterologous, e.g. preferably the 5′UTR and the 3′UTR are derived from different genes of the same or of different species. Preferably, the 3′UTR is not derived from the TOP gene the 5′UTR is derived from.

[0212] In a preferred embodiment, the 3′UTR element is chosen such that it exerts at least an additive, preferably a synergistic function with the 5′UTR element on the protein production from the ORF of the artificial nucleic acid molecule. Preferably, the protein production is increased in at least an additive, preferably a synergistic way by the 3′UTR element and the 5′UTR element. Thus, the protein amount of the protein encoded by the ORF, such as a reporter protein, e.g. luciferase, at a certain time point after initiation of expression of the ORF, e.g. after transfection of a test cell or cell line, is preferably at least the same, preferably higher than what would be expected if the protein production increasing effects of the 3′UTR element and the 5′UTR element were purely additive. The additive, preferably the synergistic effect may, for example, be determined by the following assay. Four artificial nucleic acid molecules, e.g. mRNAs, comprising an ORF encoding, e.g. a reporter protein such as luciferase, are generated, i.e. (i) lacking UTR elements (E0), (ii) containing a 5′UTR element derived from a 5′UTR of a TOP gene or of a variant thereof (E1), (iii) containing a test 3′UTR element (E2), and (iv) containing both the 5′UTR element and the test 3′UTR element (E1E2). Expression of the ORF contained in the artificial nucleic acid molecules is initiated, for example, by transfecting a test cell line, such as a mammalian cell line, e.g. HELA cells, or primary cells, e.g. HDF cells. Samples are taken at specific time points after initiation of expression, for example, after 6 hours, 24 hours, 48 hours, and 72 hours and the amount of protein produced by expression of the ORF contained in the artificial nucleic acid molecules is measured, for example, by an ELISA assay or a luciferase test, depending on the type of protein encoded by the ORF. The predicted amount of protein at a certain time point after initiation of expression obtained by construct E1E2 if the effects of the 3′UTR element and the 5′UTR element were purely additive (PPA) may be calculated as follows:

$$PP {A}_{x} = ( E {1}_{x} - E {0}_{x} ) + ( E {2}_{x} - E {0}_{x} ) + E {0}_{x} ,$$

[0213] E0 is the amount of protein obtained for the construct E0 (lacking UTRs), E1 is the amount of protein obtained for the construct E1, E2 is the protein amount obtained for the construct E2, and x is the time point after initiation of expression. The effect on increasing protein production is additive if E1E2ₓ=PPAₓ and synergistic in the sense of the present invention if E1E2ₓ>PPAₓ, wherein E1E2ₓ is the amount of protein obtained from construct E1E2 at time point x. Preferably, E1E2 is at least 1.0, preferably at least 1.1, more preferably at least 1.3, more preferably at least 1.5, even more preferably at least 1.75 times PPA at a given time point post initiation of expression, such as 24 hours, 48 hours or 72 hours post initiation of expression.

[0214] Thus, in a preferred embodiment, the present invention provides an artificial nucleic acid molecule comprising (a.) at least one 5′UTR element which comprises or consists of a nucleic acid sequence which is derived from the 5′UTR of a TOP gene or which is derived from a variant of the 5′UTR of a TOP gene; (b.) at least one open reading frame (ORF); (c.) at least one histone stem-loop, and at least one 3′UTR element, wherein preferably the 3′UTR element and the 5′UTR element act at least additively, preferably synergistically to increase protein production from the ORF, preferably wherein E1E2 ≥PPA, preferably E1E2 is at least 1.0 times PPA, preferably E1E2 is at least 1.1 times PPA, more preferably E1E2 is at least 1.3 times PPA, even more preferably wherein E1E2 is at least 1.5 times PPA at a given time point post initiation of expression of the ORF, for example 24 hours, preferably 48 hours post initiation of expression, wherein E1E2 and PPA are as described above.

[0215] Furthermore, it is preferred that the 3′UTR element and the 5′UTR element have at least an additive, preferably a synergistic effect on the total protein production from the artificial nucleic acid molecule in a certain time span, such as within 24 hours, 48 hours, or 72 hours post initiation of expression. The additive or the synergistic effect may be determined as described above, with the difference that the area under the curve (AUC) for the amount of protein over time predicted for E1E2 if the effects were purely additive is compared to the actual AUC measured for E1E2.

[0216] In a preferred embodiment, the 3′UTR element comprises or consists of a nucleic acid sequence which is derived from the 3′UTR of a stable mRNA or from a variant of the 3′UTR of a stable mRNA. Thus, in a preferred embodiment, the 3′UTR element comprises or consists of a sequence which is derived from a gene providing a stable mRNA or from a variant of a 3′UTR of a gene providing a stable mRNA. The term “stable mRNA”, preferably refers to mRNAs which exhibit a longer half-life in mammalian cells than the average half-life of mRNA molecules in mammalian cells. Preferably, a stable mRNA in the sense of the present application refers to an mRNA which exhibits a half-life of more than 5 hours, preferably more than 8 hours, in a mammalian cell, such as in a mammalian cell line, e.g. in HELA cells, or in primary cells, e.g. in HDF cells, preferably determined by using a transcription inhibitor such as actinomycin D.

[0217] For example, the half-life of an mRNA in mammalian cells, such as HELA or HDF cells, may be determined by culturing the cells in presence of a transcription inhibitor, e.g. actinomycin D, 5,6-dichloro-1-β-D-ribofuranosylbenzimidazole (DRB), or α-amanitin, harvesting the cells at different time points after inhibition of transcription, and determining the amount of the mRNA present in the cell samples by methods well known to the person skilled in the art, e.g. by quantitative RT-PCR. The half-life of a particular mRNA may be calculated based on the amounts of the particular mRNA measured at the different time points post inhibition of transcription. Alternatively, pulse-chase methods, e.g. using radioactively labelled nucleotides, or constructs comprising inducible promoters may be used for determining the half-life of an mRNA in mammalian cells.

[0218] It is particularly preferred that the enhanced stability of a stable mRNA in the sense of the present invention is affected by its 3′UTR. Thus, preferably, the 3′UTR element comprises or consists of a nucleic acid sequence which is derived from the 3′UTR of a stable mRNA which exhibits a half-life of more than 5 hours, preferably more than 8 hours, in a mammalian cell, such as in a mammalian cell line, e.g. in HELA cells, or in mammalian primary cells, such as HDF cells, preferably determined by using a transcription inhibitor such as actinomycin D, wherein the enhanced stability of said stable mRNA is effected by its 3′UTR. The ability of a 3′UTR for enhancing stability may be tested as described herein, e.g. by using a reporter open reading frame such as a luciferase encoding open reading frame. Alternatively, an artificial construct encoding the test stable mRNA may be generated, wherein the 3′UTR of the stable mRNA is replaced with a reference 3′UTR, such as a 3′UTR of a short lived mRNA, e.g. a Myc 3′UTR. The stability of the wild type stable mRNA and the 3′UTR modified mRNA may be determined as described above. In the event the 3′UTR modified mRNA exhibits a shorter half-life than the wild type stable mRNA, it may be concluded that a stability enhancing effect is exerted by the 3′UTR of the stable mRNA.

[0219] In a particularly preferred embodiment, the 3′UTR element comprises or consists of a nucleic acid sequence which is derived from a 3′UTR of a gene selected from the group consisting of an albumin gene, an α-globin gene, a β-globin gene, a tyrosine hydroxylase gene, a lipoxygenase gene, and a collagen alpha gene, such as a collagen alpha 1(I) gene, or from a variant of a 3′UTR of a gene selected from the group consisting of an albumin gene, an α-globin gene, a β-globin gene, a tyrosine hydroxylase gene, a lipoxygenase gene, and a collagen alpha gene, such as a collagen alpha 1(I) gene. In a particularly preferred embodiment, the 3′UTR element comprises or consists of a nucleic acid sequence which is derived from a 3′UTR of an albumin gene, preferably a vertebrate albumin gene, more preferably a mammalian albumin gene, most preferably a human albumin gene. In another particularly preferred embodiment, the 3′UTR element comprises or consists of a nucleic acid sequence which is derived from a 3′UTR of an α-globin gene, preferably a vertebrate α-globin gene, more preferably a mammalian α-globin gene, most preferably a human α-globin gene. For example, the 3′UTR element may comprise or consist of the center, α-complex-binding portion of the 3′UTR of an α-globin gene, such as of a human α-globin gene.

[0220] Preferably, the at least one 3′UTR element comprises or consists of a nucleic acid sequence which is derived from the 3′UTR of a vertebrate albumin gene, a vertebrate α-globin gene, a vertebrate α-globin gene, a vertebrate tyrosine hydroxylase gene, a vertebrate lipoxygenase gene, and a vertebrate collagen alpha gene, such as a vertebrate collagen alpha 1(I) gene, or from a variant thereof, preferably from the 3′UTR of a mammalian albumin gene, a mammalian α-globin gene, a mammalian α-globin gene, a mammalian tyrosine hydroxylase gene, a mammalian lipoxygenase gene, and a mammalian collagen alpha gene, such as a mammalian collagen alpha 1(I) gene, or from a variant thereof, more preferably from the 3′UTR of a human albumin gene, a human α-globin gene, a human β-globin gene, a human tyrosine hydroxylase gene, a human lipoxygenase gene, and a human collagen alpha gene, such as a human collagen alpha 1(I) gene, or from a variant thereof, even more preferably from the 3′UTR of the human albumin gene according to GenBank Accession number NM_000477.5 or from a variant thereof. In a preferred embodiment, the 3′UTR element is not derived from the 3′UTR of a Xenopus albumin gene. Preferably, the 3′UTR element does not comprise a poly(A) limiting element B (PLEB) of a 3′UTR from a Xenopus albumin gene. Preferably, the 3′UTR element does not consist of a PLEB of a 3′UTR from a Xenopus albumin gene.

[0221] In one embodiment, the 3′UTR element and the at least one open reading frame are heterologous, e.g. preferably the 3′UTR element and the ORF are derived from different genes of the same or of different species. Preferably, the ORF does not encode an α-globin protein if the 3′UTR element is derived from an α-globin gene. Preferably, the ORF does not encode a 3-globin protein if the 3′UTR element is derived from a β-globin gene. Preferably, the ORF does not encode an albumin protein if the 3′UTR element is derived from an albumin gene. Preferably, the ORF does not encode a tyrosine hydroxylase protein if the 3′UTR element is derived from a tyrosine hydroxylase gene. Preferably, the ORF does not encode a lipoxygenase protein if the 3′UTR element is derived from a lipoxygenase gene. Preferably, the ORF does not encode a collagen alpha protein if the 3′UTR element is derived from a collagene alpha gene.

[0222] In one embodiment, the artificial nucleic acid molecule may consist of at least two sequence parts that are derivable from two different genes, the 5′UTR element which is derivable from a TOP gene and the open reading frame and the 3′UTR which may be derivable from the gene encoding the desired protein product. More preferably, the artificial nucleic acid molecule consists of three sequence parts that are derivable from three different genes: the 5′UTR element which is derivable from a TOP gene, the open reading frame which is derivable from the gene encoding the desired gene product and the 3′UTR element which may be derivable from a gene that relates to an mRNA with an enhanced half-life, for example a 3′UTR element as defined and described below.

[0223] In some embodiments, the 3′UTR element consists of a histone stem-loop. In some embodiments, the 3′UTR element of the artificial nucleic acid molecule may comprise a histone stem-loop in addition to the nucleic acid sequence derived from the 3′UTR of a gene, such as of a gene providing a stable mRNA, such as of an albumin gene, an α-globin gene, a β-globin gene, a tyrosine hydroxylase gene, a lipoxygenase gene, or a collagen alpha gene, such as a collagen alpha 1(I) gene as described above. Such artificial nucleic acid molecule according to the present invention, for example, may comprise in 5′-to-3′-direction a 5′UTR element, an ORF, a 3′UTR element, preferably comprising a polyadenylation signal, a histone stem-loop and an optional poly(A) sequence. It may also comprise in 5′-to-3′-direction a 5′UTR element as described above, an ORF, a 3′UTR element, e.g. comprising a polyadenylation signal, a poly(A) sequence and a histone stem-loop.

[0224] The term ‘a nucleic acid sequence which is derived from the 3′UTR of a [ . . . ] gene’ preferably refers to a nucleic acid sequence which is based on the 3′UTR sequence of a [ . . . ] gene or on a part thereof, such as on the 3′UTR of an albumin gene, an α-globin gene, a β-globin gene, a tyrosine hydroxylase gene, a lipoxygenase gene, or a collagen alpha gene, such as a collagen alpha 1(I) gene, preferably of an albumin gene or an α-globin gene on a part thereof. This term includes sequences corresponding to the entire 3′UTR sequence, i.e. the full length 3′UTR sequence of a gene, and sequences corresponding to a fragment of the 3′UTR sequence of a gene, such as an albumin gene, α-globin gene, β-globin gene, tyrosine hydroxylase gene, lipoxygenase gene, or collagen alpha gene, such as a collagen alpha 1(I) gene, preferably of an albumin or α-globin gene. A fragment in this context preferably consists of a continuous stretch of nucleotides corresponding to a continuous stretch of nucleotides in the full-length 3′UTR, which represents at least 20%, preferably at least 30%, more preferably at least 40%, more preferably at least 50%, even more preferably at least 60%, even more preferably at least 70%, even more preferably at least 80%, and most preferably at least 90% of the full-length 3′UTR. Such a fragment, in the sense of the present invention, is preferably a functional fragment as described herein. The term ‘3′UTR of a [ . . . ] gene’ preferably refers to the 3′UTR of a naturally occurring gene, such as of a naturally occurring albumin gene, α-globin gene, β-globin gene, tyrosine hydroxylase gene, lipoxygenase gene, or collagen alpha gene, such as a collagen alpha 1(I) gene, preferably of a naturally occurring albumin or α-globin gene.

[0225] The terms ‘variant of the 3′UTR of a [ . . . ] gene’ and ‘variant thereof’ in the context of a 3′UTR refers to a variant of the 3′UTR of a naturally occurring gene, such as a naturally occurring albumin gene, a naturally occurring α-globin gene, a naturally occurring β-globin gene, a naturally occurring tyrosine hydroxylase gene, a naturally occurring lipoxygenase gene, or a naturally occurring collagen alpha gene, such as a collagen alpha 1(I) gene, preferably to a variant of the 3′UTR of a vertebrate albumin gene, a vertebrate α-globin gene, a vertebrate 3-globin gene, a vertebrate tyrosine hydroxylase gene, a vertebrate lipoxygenase gene, and a vertebrate collagen alpha gene, such as a vertebrate collagen alpha 1(I) gene, preferably to a variant of the 3′UTR of a mammalian albumin gene, a mammalian α-globin gene, a mammalian β-globin gene, a mammalian tyrosine hydroxylase gene, a mammalian lipoxygenase gene, and a mammalian collagen alpha gene, such as a mammalian collagen alpha 1(I) gene, or to a variant of the 3′UTR of a human albumin gene, a human α-globin gene, a human β-globin gene, a human tyrosine hydroxylase gene, a human lipoxygenase gene, and a human collagen alpha gene, such as a human collagen alpha 1(I) gene. Such variant may be a modified 3′UTR of a gene. For example, a variant 3′UTR may exhibit one or more nucleotide deletions, insertions, additions and/or substitutions compared to the naturally occurring 3′UTR from which the variant is derived. Preferably, a variant of a 3′UTR is at least 40%, preferably at least 50%, more preferably at least 60%, more preferably at least 70%, even more preferably at least 80%, even more preferably at least 90%, most preferably at least 95% identical to the naturally occurring 3′UTR the variant is derived from. Preferably, the variant is a functional variant as described herein.

[0226] The term ‘a nucleic acid sequence which is derived from a variant of the 3′UTR of a [ . . . ] gene’ preferably refers to a nucleic acid sequence which is based on a variant of the 3′UTR sequence of a gene, such as on a variant of the 3′UTR of an albumin gene, an α-globin gene, a β-globin gene, a tyrosine hydroxylase gene, a lipoxygenase gene, or a collagen alpha gene, such as a collagen alpha 1(I) gene, or on a part thereof as described above. This term includes sequences corresponding to the entire sequence of the variant of the 3′UTR of a gene, i.e. the full length variant 3′UTR sequence of a gene, and sequences corresponding to a fragment of the variant 3′UTR sequence of a gene. A fragment in this context preferably consists of a continuous stretch of nucleotides corresponding to a continuous stretch of nucleotides in the full-length variant 3′UTR, which represents at least 20%, preferably at least 30%, more preferably at least 40%, more preferably at least 50%, even more preferably at least 60%, even more preferably at least 70%, even more preferably at least 80%, and most preferably at least 90% of the full-length variant 3′UTR. Such a fragment of a variant, in the sense of the present invention, is preferably a functional fragment of a variant as described herein.

[0227] The terms ‘functional variant’, ‘functional fragment’, and ‘functional fragment of a variant’ (also termed ‘functional variant fragment’) in the context of the present invention, mean that the fragment of the 5′UTR or the 3′UTR, the variant of the 5′UTR or the 3′UTR, or the fragment of a variant of the 5′UTR or the 3′UTR of a gene fulfils at least one, preferably more than one, function of the naturally occurring 5′UTR or 3′UTR of the gene of which the variant, the fragment, or the fragment of a variant is derived. Such function may be, for example, stabilizing mRNA and/or stabilizing and/or prolonging protein production from an mRNA and/or increasing protein production from an mRNA, preferably in a mammalian cell, such as in a human cell. It is particularly preferred that the variant, the fragment, and the variant fragment in the context of the present invention fulfil the function of stabilizing an mRNA, preferably in a mammalian cell, such as a human cell, compared to an mRNA comprising a reference 5′UTR or lacking a 5′UTR and/or a 3′UTR, and/or the function of stabilizing and/or prolonging protein production from an mRNA, preferably in a mammalian cell, such as in a human cell, compared to an mRNA comprising a reference 5′UTR or lacking a 5′UTR and/or a 3′UTR, and/or the function of increasing protein production from an mRNA, preferably in a mammalian cell, such as in a human cell, compared to an mRNA comprising a reference 5′UTR or lacking a 5′UTR and/or a 3′UTR. A reference 5′UTR may be, for example, a 5′UTR naturally occurring in combination with the ORF. Furthermore, a functional variant, a functional fragment, or a functional variant fragment of a 5′UTR or of a 3′UTR of a gene preferably does not have a substantially diminishing effect on the efficiency of translation of the mRNA which comprises such variant of a 5′UTR and/or such variant of a 3′UTR compared to the wild type 5′UTR and/or 3′UTR from which the variant is derived. A particularly preferred function of a “functional fragment”, a “functional variant” or a “functional fragment of a variant” of the 3′UTR of a gene, such as an albumin gene, α-globin gene, β-globin gene, tyrosine hydroxylase gene, lipoxygenase gene, or collagen alpha gene, such as a collagen alpha 1(I) gene, in the context of the present invention is the stabilization and/or prolongation of protein production by expression of an mRNA carrying the functional fragment, functional variant or functional fragment of a variant as described above. A particularly preferred function of a “functional fragment”, a “functional variant” or a “functional fragment of a variant” of the 5′UTR in the context of the present invention is the protein production increasing function.

[0228] Preferably, the efficiency of the one or more functions exerted by the functional variant, the functional fragment, or the functional variant fragment, such as mRNA and/or protein production stabilizing efficiency and/or the protein production increasing efficiency, is at least 40%, more preferably at least 50%, more preferably at least 60%, even more preferably at least 70%, even more preferably at least 80%, most preferably at least 90% of the mRNA and/or protein production stabilizing efficiency and/or the protein production increasing efficiency exhibited by the naturally occurring 5′UTR and/or 3′UTR of which the variant, the fragment or the variant fragment is derived.

[0229] In the context of the present invention, a fragment or part of the 3′UTR of a gene, such as an albumin gene, α-globin gene, β-globin gene, tyrosine hydroxylase gene, lipoxygenase gene, or collagen alpha gene, such as a collagen alpha 1(I) gene, or of a variant thereof preferably exhibits a length of at least about 40 nucleotides, preferably of at least about 50 nucleotides, preferably of at least about 75 nucleotides, more preferably of at least about 100 nucleotides, even more preferably of at least about 125 nucleotides, most preferably of at least about 150 nucleotides. Preferably, such fragment of the 3′UTR of a gene or of a variant of the 3′UTR of a gene is a functional fragment as described above.

[0230] In the context of the present invention, a fragment or part of the 5′UTR of a TOP gene or of a variant thereof preferably exhibits a length of at least about 20 nucleotides, preferably of at least about 30 nucleotides, more preferably of at least about 50 nucleotides. Preferably, such fragment of the 5′UTR of a TOP gene or of a variant of the 5′UTR of a TOP gene is a functional fragment as described above.

[0231] In some embodiments, the 3′UTR element of the artificial nucleic acid molecule according to the present invention comprises or consists of a “functional fragment”, a “functional variant” or a “functional fragment of a variant” of the 3′UTR of a gene, such as of an albumin gene, α-globin gene, β-globin gene, tyrosine hydroxylase gene, lipoxygenase gene, or collagen alpha gene, such as a collagen alpha 1(I) gene, or of a variant thereof.

[0232] In some embodiments, the at least one 5′UTR element of the artificial nucleic acid molecule according to the present invention comprises or consists of a “functional fragment”, a “functional variant” or a “functional fragment of a variant” of the 5′UTR of a TOP gene.

[0233] Preferably, the 3′UTR element of the artificial nucleic acid molecule according to the present invention increases the stability of the artificial nucleic acid molecule, e.g. increases the stability of an mRNA according to the present invention, compared to a respective mRNA (reference mRNA) lacking a 3′UTR element. Preferably, the at least one 3′UTR element of the artificial nucleic acid molecule according to the present invention increases the stability of protein production from the artificial nucleic acid molecule according to the present invention, e.g. from an mRNA according to the present invention, compared to a respective mRNA lacking a 3′UTR element. Preferably, the at least one 3′UTR element of the artificial nucleic acid molecule according to the present invention prolongs protein production from the artificial nucleic acid molecule according to the present invention, e.g. from an mRNA according to the present invention, compared to a respective mRNA lacking a 3′UTR element. Preferably, the at least one 3′UTR element of the artificial nucleic acid molecule according to the present invention increases the protein production from the artificial nucleic acid molecule according to the present invention, e.g. from an mRNA according to the present invention, compared to a respective mRNA lacking a 3′UTR element. Preferably, the at least one 3′UTR element of the artificial nucleic acid molecule according to the present invention does not negatively influence translational efficiency of an mRNA compared to the translational efficiency of a respective mRNA lacking a 3′UTR element. The term ‘respective mRNA’ in this context means that—apart from the different 3′UTR—the reference mRNA is comparable, preferably identical, to the mRNA comprising the 3′UTR element.

[0234] Preferably, the at least one 5′UTR element of the artificial nucleic acid molecule according to the present invention increases the stability of the artificial nucleic acid molecule, e.g. increases the stability of an mRNA according to the present invention, compared to a respective mRNA (reference mRNA) lacking a 5′UTR element or comprising a reference 5′UTR element, such as a 5′UTR naturally occurring in combination with the ORF. Preferably, the at least one 5′UTR element of the artificial nucleic acid molecule according to the present invention increases protein production from the artificial nucleic acid molecule according to the present invention, e.g. from an mRNA according to the present invention, compared to a respective mRNA lacking a 5′UTR element or comprising a reference 5′UTR element, such as a 5′UTR naturally occurring in combination with the ORF. The term ‘respective mRNA’ in this context means that—apart from the different 5′UTR—the reference mRNA is comparable, preferably identical, to the mRNA comprising the inventive 5′UTR element.

[0235] Preferably, the histone stem-loop of the artificial nucleic acid molecule according to the present invention increases the stability of the artificial nucleic acid molecule, e.g. increases the stability of an mRNA according to the present invention, compared to a respective mRNA (reference mRNA) lacking a histone stem-loop. Preferably, the histone stem-loop of the artificial nucleic acid molecule according to the present invention increases protein production from the artificial nucleic acid molecule according to the present invention, e.g. from an mRNA according to the present invention, compared to a respective mRNA lacking a histone stem-loop. The term ‘respective mRNA’ in this context means that—apart from the histone stem loop—the reference mRNA is comparable, preferably identical, to the mRNA comprising the a histone stem-loop.

[0236] Preferably, the at least one 5′UTR element and the at least one 3′UTR element act synergistically to increase protein production from the artificial nucleic acid molecule according to the present invention, e.g. from an mRNA according to the present invention, as described above.

[0237] Preferably, the at least one 5′UTR element and the histone stem-loop act synergistically to increase protein production from the artificial nucleic acid molecule according to the present invention, e.g. from an mRNA according to the present invention, as described above.

[0238] The term ‘stabilizing and/or prolonging protein production from an mRNA’ preferably means that the protein production from the mRNA is stabilized and/or prolonged compared to the protein production from a reference mRNA, e.g. lacking a 3′UTR element. ‘Stabilized protein expression’ in this context preferably means that there is more uniform protein production from the artificial nucleic acid molecule according to the present invention over a predetermined period of time, such as over 24 hours, more preferably over 48 hours, even more preferably over 72 hours, when compared to a reference nucleic acid molecule, for example, lacking a 3′UTR element. Thus, the level of protein production, e.g. in a mammalian system, from the artificial nucleic acid molecule comprising a 3′UTR element according to the present invention, e.g. from an mRNA according to the present invention, preferably does not drop to the extent observed for a reference nucleic acid molecule. For example, the amount of a protein (encoded by the ORF) observed 6 hours after initiation of expression, e.g. 6 hours post transfection of the artificial nucleic acid molecule according to the present invention into a cell, such as a mammalian cell, may be comparable to the amount of protein observed 48 hours after initiation of expression, e.g. 48 hours post transfection. Thus, the ratio of the amount of protein encoded by the ORF, such as of a reporter protein, e.g., luciferase, observed at 48 hours post initiation of expression, e.g. 48 hours post transfection, to the amount of protein observed 6 hours after initiation of expression, e.g. 6 hours post transfection, is preferably above 0.4, preferably above 0.5, more preferably above 0.6, even more preferably above 0.7, e.g. between about 0.4 and about 4, preferably between about 0.65 and about 3, more preferably between about 0.7 and 2 for a nucleic acid molecule according to the present invention. Thus, in one embodiment, the present invention provides an artificial nucleic acid molecule as described above, wherein the ratio of the (reporter) protein amount observed 48 hours after initiation of expression to the (reporter) protein amount observed 6 hours after initiation of expression, preferably in a mammalian expression system, such as in mammalian cells, is preferably between about 0.4 and 4, preferably between about 0.65 and about 3, more preferably between about 0.7 and 2.

[0239] ‘Increased protein expression’ in the context of the present invention may refer to increased protein expression at one time point after initiation of expression compared to a reference molecule or to an increased total protein production within a certain time period after initiation of expression. Thus, the protein level observed at a certain time point after initiation of expression, e.g. after transfection, of the artificial nucleic acid molecule according to the present invention, e.g. after transfection of an mRNA according to the present invention, for example, 24, 48, or 72 hours post transfection, or the total protein produced in a time span of, e.g. 24, 48 or 72 hours, is preferably higher than the protein level observed at the same time point after initiation of expression, e.g. after transfection, or the total protein produced within the same time span, for a reference nucleic acid molecule, such as a reference mRNA comprising a reference 5′UTR element or lacking a 5′UTR element and/or 3′UTR element and/or a histone stem-loop. As set forth above, it is a particularly preferred function of the 5′UTR element and the histone stem-loop to effect an increase in protein production from the artificial nucleic acid molecule. Preferably, the increase in protein production effected by the 5′UTR element and the histone stem-loop compared to a reference nucleic acid molecule lacking such 5′UTR element and a histone stem-loop at a given time point post initiation of expression is at least 1.5-fold, more preferably at least 2-fold, more preferably at least 3-fold, more preferably at least 4-fold, more preferably at least 5-fold, even more preferably at least 10-fold, even more preferably at least 15-fold of the protein production observed for a reference nucleic acid molecule lacking the 5′UTR element and a histone stem-loop. The same holds preferably for the total protein production in a given time period, for example in a time period of 24, 48 or 72 hours post initiation of expression.

[0240] Said increase in stability of the artificial nucleic acid molecule, said increase in stability of protein production, said prolongation of protein production and/or said increase in protein production is preferably determined by comparison with a respective reference nucleic acid molecule lacking a 5′UTR element and/or a 3′UTR element and/or a histone stem-loop, e.g. an mRNA lacking a 5′UTR element and/or a 3′UTR element and/or a histone stem-loop, or a reference nucleic acid molecule comprising a reference 5′UTR element and/or a reference 3′UTR element, such as a 3′UTR and/or a 5′UTR naturally occurring with the ORF or a 5′UTR and/or a 3′UTR of a reference gene.

[0241] The mRNA and/or protein production stabilizing effect and efficiency and/or the protein production increasing effect and efficiency of the variants, fragments and/or variant fragments of the 3′UTR of an albumin gene as well as the mRNA and/or protein production stabilizing effect and efficiency and/or the protein production increasing effect and efficiency of the 3′UTR element, the at least one 5′UTR element, or the histone stem-loop of the artificial nucleic acid molecule according to the present invention may be determined by any method suitable for this purpose known to the skilled person. For example, artificial mRNA molecules may be generated comprising a coding sequence for a reporter protein, such as luciferase, and no 3′UTR and/or no 5′UTR and/or no histone stem-loop, a 5′UTR derived from a TOP gene and/or a 3′UTR derived from a gene as described above and/or a histone stem-loop as described above, a 5′UTR derived from a reference gene and/or a 3′UTR derived from a reference gene (i.e., a reference 3′UTR or a reference 5′UTR, such as a 5′UTR or a 3′UTR naturally occurring with the ORF), as 3′UTR a variant of a 3′UTR of a gene as described above, as 3′UTR a fragment of a 3′UTR of a gene as described above, or as 3′UTR a fragment of a variant of a 3′UTR of a gene as described above, as 5′UTR a variant of a 5′UTR of a TOP gene, as 5′UTR a fragment of a 5′UTR of a TOP gene, or as 5′UTR a fragment of a variant of a 5′UTR of a TOP gene. Such mRNAs may be generated, for example, by in vitro transcription of respective vectors such as plasmid vectors, e.g. comprising a T7 promoter and a sequence encoding the respective mRNA sequences. The generated mRNA molecules may be transfected into cells by any transfection method suitable for transfecting mRNA, for example they may be electroporated into mammalian cells, such as HELA or HDF cells, and samples may be analyzed certain time points after transfection, for example, 6 hours, 24 hours, 48 hours, and 72 hours post transfection. Said samples may be analyzed for mRNA quantities and/or protein quantities by methods well known to the skilled person. For example, the quantities of reporter mRNA present in the cells at the sample time points may be determined by quantitative PCR methods. The quantities of reporter protein encoded by the respective mRNAs may be determined, e.g., by ELISA assays or reporter assays such as luciferase assays depending on the reporter protein used. The effect of stabilizing protein expression and/or prolonging protein expression may be, for example, analyzed by determining the ratio of the protein level observed 48 hours post transfection and the protein level observed 6 hours post transfection. The closer said value is to 1, the more stable the protein expression is within this time period. Said value may also be above 1 if the protein level is higher at the later time point. Such measurements may of course also be performed at 72 or more hours and the ratio of the protein level observed 72 hours post transfection and the protein level observed 6 hours post transfection may be determined to determine stability of protein expression.

[0242] Preferably, the 3′UTR element of the artificial nucleic acid molecule according to the present invention comprises or consists of a nucleic acid sequence which has an identity of at least about 40%, preferably of at least about 50%, preferably of at least about 60%, preferably of at least about 70%, more preferably of at least about 80%, more preferably of at least about 90%, even more preferably of at least about 95%, even more preferably of at least about 99%, most preferably of 100% to a nucleic acid sequence selected from SEQ ID NOs. 1369-1377 and 1434 and corresponding RNA sequences, wherein the variants of the sequences according to SEQ ID NOs. 1369-1377 and 1434 are preferably functional variants as described above. SEQ ID NOs. 1369, 1371 and 1434, variants thereof, and corresponding RNA sequences are particularly preferred.

[0243] The 3′UTR element of the artificial nucleic acid molecule according to the present invention may also comprise or consist of a fragment of a nucleic acid sequence which has an identity of at least about 40%, preferably of at least about 50%, preferably of at least about 60%, preferably of at least about 70%, more preferably of at least about 80%, more preferably of at least about 90%, even more preferably of at least about 95%, even more preferably of at least about 99%, most preferably of 100% to the nucleic acid sequence according to SEQ ID No. 1369-1377 and 1434 and of corresponding RNA sequences, wherein the fragment is preferably a functional fragment or a functional variant fragment as described above. Preferably, the fragment is as described above, i.e. being a continuous stretch of nucleotides representing at least 20% etc. of the full-length 3′UTR the fragment is derived from. Such fragment preferably exhibits a length of at least about 40 nucleotides, preferably of at least about 50 nucleotides, preferably of at least about 75 nucleotides, more preferably of at least about 100 nucleotides, even more preferably of at least about 125 nucleotides, most preferably of at least about 150 nucleotides.

[0244] For example, such fragment may exhibit a nucleic acid sequence according to SEQ ID Nos. 1378-1390, such as:

(SEQ ID No. 1378)
AAAAGCATCT CAGCCTACCA TGAGAATAAG AGAAAGAAAA TGAAGATCAA AAGCTTATTC
ATCTGTTTTT CTTTTTCGTT GGTGTAAAGC CAACACCCTG TCTAAAAAAC ATAAATTTCT
TTAATCATTT TGCCTCTTTT CTCTGTGCTT CAATT
(SEQ ID No. 1379)
CATCACATTT AAAAGCATCT CAGCCTACCA TGAGAATAAG AGAAAGAAAA TGAAGATCAA
AAGCTTATTC ATCTGTTTTT CTTTTTCGTT GGTGTAAAGC CAACACCCTG
(SEQ ID No. 1380)
AAAAGCATCT CAGCCTACCA TGAGAATAAG AGAAAGAAAA TGAAGATCAA AAGCTTATTC
ATCTGTTTTT CTTTTTCGTT GGTGTAAAGC CAACACCCTG TCTAAAAAAC
(SEQ ID No. 1381)
CAGCCTACCA TGAGAATAAG AGAAAGAAAA TGAAGATCAA AAGCTTATTC ATCTGTTTTT
CTTTTTCGTT GGTGTAAAGC CAACACCCTG TCTAAAAAAC ATAAATTTCT
(SEQ ID No. 1382)
TGAGAATAAG AGAAAGAAAA TGAAGATCAA AAGCTTATTC ATCTGTTTTT CTTTTTCGTT
GGTGTAAAGC CAACACCCTG TCTAAAAAAC ATAAATTTCT TTAATCATTT
(SEQ ID No. 1383)
AGAAAGAAAA TGAAGATCAA AAGCTTATTC ATCTGTTTTT CTTTTTCGTT GGTGTAAAGC
CAACACCCTG TCTAAAAAAC ATAAATTTCT TTAATCATTT TGCCTCTTTT
(SEQ ID No. 1384)
TGAAGATCAA AAGCTTATTC ATCTGTTTTT CTTTTTCGTT GGTGTAAAGC CAACACCCTG
TCTAAAAAAC ATAAATTTCT TTAATCATTT TGCCTCTTTT CTCTGTGCTT
(SEQ ID No. 1385)
AAGCTTATTC ATCTGTTTTT CTTTTTCGTT GGTGTAAAGC CAACACCCTG TCTAAAAAAC
ATAAATTTCT TTAATCATTT TGCCTCTTTT CTCTGTGCTT CAATTAATAA
(SEQ ID No. 1386)
ATCTGTTTTT CTTTTTCGTT GGTGTAAAGC CAACACCCTG TCTAAAAAAC ATAAATTTCT
TTAATCATTT TGCCTCTTTT CTCTGTGCTT CAATTAATAA AAAATGGAAA
(SEQ ID No. 1387)
CAGCCTACCA TGAGAATAAG AGAAAGAAAA TGAAGATCAA AAGCTTATTC ATCTGTTTTT
CTTTTTCGTT GGTGTAAAGC CAACACCCTG TCTAAAAAAC ATAAATTTCT TTAATCATTT
TGCCTCTTTT CTCTGTGCTT CAATTAATAA A
(SEQ ID No. 1388)
TGAAGATCAA AAGCTTATTC ATCTGTTTTT CTTTTTCGTT GGTGTAAAGC CAACACCCTG
TCTAAAAAAC ATAAATTTCT TTAATCATTT TGCCTCTTTT CTCTGTGCTT CAATTAATAA
A
(SEQ ID No. 1389)
CTTTTTCGTT GGTGTAAAGC CAACACCCTG TCTAAAAAAC ATAAATTTCT TTAATCATTT
TGCCTCTTTT CTCTGTGCTT CAATTAATAA A
(SEQ ID No. 1390)
AAGCTTATTC ATCTGTTTTT CTTTTTCGTT GGTGTAAAGC CAACACCCTG TCTAAAAAAC

or the corresponding RNA sequence, or a nucleic acid sequence which is at least 40%, preferably at least about 50%, preferably at least about 60%, preferably at least about 70%, more preferably at least about 80%, more preferably at least about 90%, even more preferably at least about 95%, even more preferably at least about 99% identical to said nucleic acid sequences or the corresponding RNA sequence. Thus, the at least one 3′UTR element of the artificial nucleic acid molecule according to the present invention may comprise or consist of a nucleic acid fragment as described above. Obviously, the thymidine nucleotides comprised in the fragments according to SEQ ID Nos. 1378-1390 may be replaced by uridine nucleotides.

[0245] Preferably, said variants, fragments or variant fragments are functional variants, functional fragments, or functional variant fragments as described above, exhibiting at least one function of the nucleic acid sequence according to SEQ ID Nos. 1369-1377 and 1434, such as stabilization of the artificial nucleic acid molecule according to the invention, stabilizing and/or prolonging protein expression from the artificial nucleic acid molecule according to the invention, and/or increasing protein production, preferably with an efficiency of at least 40%, more preferably of at least 50%, more preferably of at least 60%, even more preferably of at least 70%, even more preferably of at least 80%, most preferably of at least 90% of the stabilizing efficiency and/or protein production increasing efficiency exhibited by the nucleic acid sequence according to SEQ ID Nos. 1369-1377 and 1434. Preferably, variants, fragments or variant fragments are functional variants, functional fragments, or functional variant fragments exhibit the function of acting synergistically with the 5′UTR element to increase protein production from the artificial nucleic acid molecule.

[0246] Preferably, the 3′UTR element of the artificial nucleic acid molecule according to the present invention exhibits a length of at least about 40 nucleotides, preferably of at least about 50 nucleotides, preferably of at least about 75 nucleotides, more preferably of at least about 100 nucleotides, even more preferably of at least about 125 nucleotides, most preferably of at least about 150 nucleotides. For example, the 3′UTR may exhibit a length of about 50 to about 300 nucleotides, preferably of about 100 to about 250 nucleotides, more preferably of about 150 to about 200 nucleotides.

[0247] Furthermore, the artificial nucleic acid molecule according to the present invention may comprise more than one 3′UTR elements as described above. For example, the artificial nucleic acid molecule according to the present invention may comprise one, two, three, four or more 3′UTR elements, wherein the individual 3′UTR elements may be the same or they may be different. For example, the artificial nucleic acid molecule according to the present invention may comprise two essentially identical 3′UTR elements as described above, e.g. two 3′UTR elements comprising or consisting of a nucleic acid sequence which is derived from the 3′UTR of an albumin gene or an α-globin gene or from a variant of the 3′UTR of an albumin gene or of an α-globin gene, such as a nucleic acid sequence according to SEQ ID No. 1369, 1371, 1376, or 1434, functional variants thereof, functional fragments thereof, or functional variant fragments thereof as described above.

[0248] In a preferred embodiment, the artificial nucleic acid molecule comprises (a.) at least one 5′UTR element which comprises or consists of a nucleic acid sequence which is derived from the 5′UTR of a TOP gene encoding a ribosomal protein as described above, for example, encoding a ribosomal Large protein, or from a variant thereof, (b.) at least one open reading frame, (c.) at least one histone stem-loop as described herein, such as at least one histone stem-loop according to SEQ ID NOs. 1391-1433, optionally (d.) a poly(A) sequence or a poly(A) signal, optionally (e.) a poly(C) sequence, and optionally (f.) at least one 3′UTR element, preferably derived from a gene providing a stable mRNA, e.g., which comprises or consists of a nucleic acid sequence which is derived from the 3′UTR of an albumin gene or an α-globin gene, such as a sequence selected from the group consisting of SEQ ID NOs: 1369, 1371, and 1434 or a variant thereof as described herein.

[0249] Preferably, the sequence of elements of the artificial nucleic acid molecule in 5′-to-3′-direction is 5′-[at least one 5′UTR]-[ORF]-[optional at least one 3′UTR]-[optional poly(A) sequence]-[optional poly(C) sequence]-[at least one histone stem-loop]-3′.

[0250] In a particularly preferred embodiment, the artificial nucleic acid moleucle comprises (a.) at least one 5′UTR element which comprises or consists of a nucleic acid sequence which is derived from the 5′UTR of a ribosomal protein Large 32 gene (RPL32), a ribosomal protein Large 35 gene (RPL35), a ribosomal protein Large 21 gene (RPL21), an ATP synthase, H+ transporting, mitochondrial F1 complex, alpha subunit 1, cardiac muscle (ATP5A1) gene, an hydroxysteroid (17-beta) dehydrogenase 4 gene (HSD17B4), an androgen-induced 1 gene (AIG 1), cytochrome c oxidase subunit VIc gene (COX6C), or a N-acylsphingosine amidohydrolase (acid ceramidase) 1 gene (ASAH1) or from a variant thereof, preferably from a vertebrate ribosomal protein Large 32 gene (RPL32), a vertebrate ribosomal protein Large 35 gene (RPL35), a vertebrate ribosomal protein Large 21 gene (RPL21), a vertebrate ATP synthase, H+ transporting, mitochondrial F1 complex, alpha subunit 1, cardiac muscle (ATP5A1) gene, a vertebrate hydroxysteroid (17-beta) dehydrogenase 4 gene (HSD17B4), a vertebrate androgen-induced 1 gene (AIG1), a vertebrate cytochrome c oxidase subunit VIc gene (COX6C), or a vertebrate N-acylsphingosine amidohydrolase (acid ceramidase) 1 gene (ASAH1) or from a variant thereof, more preferably from a mammalian ribosomal protein Large 32 gene (RPL32), a ribosomal protein Large 35 gene (RPL35), a ribosomal protein Large 21 gene (RPL21), a mammalian ATP synthase, H+ transporting, mitochondrial F1 complex, alpha subunit 1, cardiac muscle (ATP5A1) gene, a mammalian hydroxysteroid (17-beta) dehydrogenase 4 gene (HSD17B4), a mammalian androgen-induced 1 gene (AIG1), a mammalian cytochrome c oxidase subunit VIc gene (COX6C), or a mammalian N-acylsphingosine amidohydrolase (acid ceramidase) 1 gene (ASAH1) or from a variant thereof, most preferably from a human ribosomal protein Large 32 gene (RPL32), a human ribosomal protein Large 35 gene (RPL35), a human ribosomal protein Large 21 gene (RPL21), a human ATP synthase, H+ transporting, mitochondrial F1 complex, alpha subunit 1, cardiac muscle (ATP5A1) gene, a human hydroxysteroid (17-beta) dehydrogenase 4 gene (HSD17B4), a human androgen-induced 1 gene (AIG1), a human cytochrome c oxidase subunit VIc gene (COX6C), or a human N-acylsphingosine amidohydrolase (acid ceramidase) 1 gene (ASAH1) or from a variant thereof, wherein preferably the 5′UTR element does not comprise the 5′TOP of said gene, such as the sequence according to SEQ ID NO: 1368 or SEQ ID NOs 1452-1460 or a variant thereof, (b.) at least one open reading frame, (c.) at least one histone stem-loop, such as at least one histone stem-loop according to SEQ ID NOs. 1391-1433, optionally (d.) a poly(A) sequence and/or a poly(A) signal, optionally (e.) a poly(C) sequence, and optionally (f.) at least one 3′UTR element which comprises or consists of a nucleic acid sequence which is derived from an albumin gene or an α-globin gene, such as a sequence selected from the group consisting of SEQ ID NOs: 1369, 1371, and 1434 or a variant thereof as described herein.

[0251] In a particularly preferred embodiment, the artificial nucleic acid molecule according to the present invention comprises:
[0252] (a.) at least one 5′UTR element which comprises or consists of a nucleic acid sequence which has an identity of at least about 40%, preferably of at least about 50%, preferably of at least about 60%, preferably of at least about 70%, more preferably of at least about 80%, more preferably of at least about 90%, even more preferably of at least about 95%, even more preferably of at least about 99% to the nucleic acid sequence according to SEQ ID No. 1368 or SEQ ID NOs. 1452-1460, or a corresponding RNA sequence,
[0253] (b.) at least one open reading frame,
[0254] (c.) at least one histone stem-loop as described herein, such as a histone stem-loop sequence according to any one of SEQ ID NOs. 1391-1433, preferably a histone stem-loop sequence having a sequence identity of at least about 75%, preferably of at least about 80%, preferably at least about 85%, more preferably at least about 90%, even more preferably at least about 95% to the sequence according to SEQ ID NO. 1433 or a corresponding RNA sequence, wherein preferably positions 6, 13 and 20 of the sequence having a sequence identity of at least about 75%, preferably of at least about 80%, preferably at least about 85%, more preferably at least about 90%, even more preferably at least about 95% to the sequence according to SEQ ID NO. 1433 or the corresponding RNA sequence are conserved, i.e. are identical to the nucleotides at positions 6, 13 and 20 of SEQ ID NO. 1433,
[0255] (d.) optionally, a poly(A) sequence or a poly(A) signal as described herein,
[0256] (e.) optionally, a poly(C) sequence, and
[0257] (f.) optionally, a 3′UTR element, preferably a 3′UTR element which is derived from a gene providing a stable mRNA, such as a 3′UTR element which comprises or consists of a nucleic acid sequence which has an identity of at least about 40%, preferably of at least about 50%, preferably of at least about 60%, preferably of at least about 70%, more preferably of at least about 80%, more preferably of at least about 90%, even more preferably of at least about 95%, even more preferably of at least about 99%, most preferably of 100% to the nucleic acid sequence according to SEQ ID No. 1369, 1371, or 1434 or a corresponding RNA sequence.

[0258] Thus, in a particularly preferred embodiment, the present invention provides an artificial nucleic acid molecule comprising a 5′UTR element which comprises or consists of a nucleic acid sequence which has an identity of at least about 90% to the nucleic acid sequence according to SEQ ID No. 1368 or SEQ ID NOs. 1452-1460, or a corresponding RNA sequence, a histone stem-loop comprising a sequence which has an identity of at least about 90% to the sequence according to SEQ ID NO. 1434 or a corresponding RNA sequence, optionally a poly(A) sequence and/or a poly(A) signal as described herein, optionally a poly(C) sequence, and optionally a 3′UTR element which comprises or consists of a nucleic acid sequence which has an identity of at least about 90% to the nucleic acid sequence according to SEQ ID No. 1369, 1371 or 1434.

[0259] Preferably, the artificial nucleic acid molecule according to the present invention does not contain one or two or at least one or all but one or all of the components of the group consisting of: a sequence encoding a ribozyme (preferably a self-splicing ribozyme), a viral nucleic acid sequence, a histone stem-loop processing signal, in particular a histone stem-loop processing sequence derived from mouse histon H2A614 gene, a Neo gene, an inactivated promoter sequence and an inactivated enhancer sequence. Even more preferably, the nucleic acid according to the invention does not contain a ribozyme, preferably a self-splicing ribozyme, and one of the group consisting of: a Neo gene, an inactivated promotor sequence, an inactivated enhancer sequence, a histon stem-loop processing signal, in particular a histon-stem loop processing sequence derived from mouse histon H2A614 gene. Accordingly, the nucleic acid may in a preferred mode neither contain a ribozyme, preferably a self-splicing ribozyme, nor a Neo gene or, alternatively, neither a ribozyme, preferably a self-splicing ribozyme, nor any resistance gene (e.g. usually applied for selection). In an other preferred mode, the nucleic acid molecule of the invention may neither contain a ribozyme, preferably a self-splicing ribozyme, nor a histone stem-loop processing signal, in particular a histone stem-loop processing sequence derived from mouse histone H2A614 gene.

[0260] Furthermore, it is preferred that the inventive artificial nucleic acid molecule according to the present invention does not comprise an intron.

[0261] The artificial nucleic acid molecule according to the present invention may be RNA, such as mRNA, DNA, such as a DNA vector, or may be a modified RNA or DNA molecule. It may be provided as a double-stranded molecule having a sense strand and an anti-sense strand, for example, as a DNA molecule having a sense strand and an anti-sense strand.

[0262] The invention also provides an artificial nucleic acid molecule which is an mRNA molecule comprising a, 5′UTR element, an open reading frame, a histone stem-loop as described herein, an optional 3′UTR element as described herein and an optional poly(A) sequence.

[0263] The artificial nucleic acid molecule according to the present invention may further comprise a 5′-cap. The optional 5′-cap is preferably attached to the 5′-side of the 5′UTR element.

[0264] The invention provides an artificial nucleic acid molecule which may be a template for an RNA molecule, preferably for an mRNA molecule, which is stabilised and optimized with respect to translation efficiency. In other words, the artificial nucleic acid molecule may be a DNA or RNA which may be used for production of an mRNA. The obtainable mRNA, may, in turn, be translated for production of a desired peptide or protein encoded by the open reading frame. If the artificial nucleic acid molecule is a DNA, it may, for example, be used as a double-stranded storage form for continued and repetitive in vitro or in vivo production of mRNA.

[0265] Potential transcription systems are in vitro transcription systems or cellular transcription systems etc. Accordingly, transcription of an artificial nucleic acid molecule according to the invention, e.g. transcription of an artificial nucleic acid molecule comprising a 5′UTR element, an open reading frame, a histone stem-loop, a 3′UTR element, and a polyadenylation-signal, may result in an mRNA molecule comprising a 5′UTR element, an open reading frame, a histone stem-loop, a 3′UTR element and a poly(A) sequence.

[0266] For example, the artificial nucleic acid molecule according to the present invention may comprise a nucleic acid sequence corresponding to the DNA sequence

(SEQ ID No. 1377)
CATCACATTT AAAAGCATCT CAGCCTACCA TGAGAATAAG
AGAAAGAAAA TGAAGATCAA AAGCTTATTC ATCTGTTTTT
CTTTTTCGTT GGTGTAAAGC CAACACCCTG TCTAAAAAAC
ATAAATTTCT TTAATCATTT TGCCTCTTTT CTCTGTGCTT
CAATTAATAA AAAATGGAAA GAATCTAGAT CTAAAAAAAA
AAAAAAAAAA AAAAAAAAAA AAAAAAAAAA AAAAAAAAAA
AAAAAAAAAA AAAAAA.

[0267] Transcription of such a sequence may result in an artificial nucleic acid molecule comprising a corresponding RNA sequence.

[0268] Such artificial RNA molecule may also be obtainable in vitro by common methods of chemical synthesis without being necessarily transcribed from a DNA progenitor.

[0269] In a particularly preferred embodiment, the artificial nucleic acid molecule according to the present invention is an RNA molecule, preferably an mRNA molecule comprising in 5′-to-3′-direction a 5′UTR element as described above, an open reading frame, an optional 3′UTR element as described above, an optional poly(A) sequence, an optional poly(C) sequence, and a histone stem-loop as described herein.

[0270] In some embodiments, the artificial nucleic acid molecule comprises further elements such as an IRES-motif. An internal ribosome entry side (IRES) sequence or IRES-motif may separate several open reading frames, for example if the artificial nucleic acid molecule encodes for two or more peptides or proteins. An IRES-sequence may be particularly helpful if the mRNA is a bi- or multicistronic RNA.

[0271] Furthermore, the artificial nucleic acid molecule may comprise additional 5′-elements such as a promoter or enhancer sequence. The promoter may drive and or regulate transcription of the artificial nucleic acid molecule according to the present invention, for example of an artificial DNA molecule according to the present invention.

[0272] In preferred embodiments, the invention provides artificial nucleic acid molecules, preferably mRNA molecules, comprising in 5′-to-3′-direction at least one of the following structures:
[0273] 5′-cap-5′UTR element-ORF-3′UTR element-histone stem-loop-poly(A) sequence
[0274] 5′-cap-5′UTR element-ORF-3′UTR element-poly(A) sequence-histone stem-loop
[0275] 5′-cap-5′UTR element-ORF-IRES-ORF-3′UTR element-histone stem-loop-poly(A) sequence
[0276] 5′-cap-5′UTR element-ORF-IRES-ORF-3′UTR element-poly(A) sequence-histone stem-loop
[0277] 5′-cap-5′UTR element-ORF-3′UTR element-poly(A) sequence-poly(C) sequence-histone stem-loop
[0278] 5′-cap-5′UTR element-ORF-IRES-ORF-3′UTR element-poly(A) sequence-poly(C) sequence-histone stem-loop
[0279] 5′-cap-5′UTR element-ORF-IRES-ORF-3′UTR element-histone stem-loop-poly(A) sequence-poly(C) sequence

[0280] More preferably, the inventive artificial nucleic acid molecule comprises or codes for (a.) a 5′UTR-element; (b.) an open reading frame, preferably encoding a peptide or protein; (c.) at least one histone stem-loop, optionally (d.) a poly(A) sequence and/or polyadenylation signal; (e.) optionally a poly(C) sequence; and (f.) optionally a 3′UTR element, preferably for increasing the expression level of an encoded protein, wherein the encoded protein is preferably no histone protein, no reporter protein and/or no marker or selection protein, as defined above. The elements (c.) to (f) of the inventive artificial nucleic acid molecule may occur in the inventive artificial nucleic acid molecule in any sequence, i.e. the elements (a.), (b.), (c.), (d.), (e.) and (f.) may, for example, occur in the sequence (a.), (b.), (c.), (d.), (e.) and (f), or (a.), (b.), (d.), (c.), (e.) and (f), or (a.), (b.), (c.), (d.), (f.) and (e.), or (a.), (b.), (d.), (c.), (f.) and (e.), or (a.), (b.), (e.), (d.), (c.) and (f.), or (a.), (b.), (e.), (d.), (f.) and (c.), or (a.), (b.), (c.), (f.), (e.) and (d.) etc., wherein further elements as described herein, may also be contained, such as a 5′-CAP structure, stabilization sequences, IRES sequences, etc. Each of the elements (a.) to (f.) of the inventive artificial nucleic acid molecule, particularly b), may occur in di- or multicistronic constructs and/or each of the elements (a.), (c.) and (f.) may also be repeated at least once, preferably twice or more in the inventive artificial nucleic acid molecule. As an example, the inventive artificial nucleic acid molecule may comprise its sequence elements (a.), (b.), (c.) and optionally (d.) in e.g. the following order. In all cases the artificial nucleic acid molecule may additionally comprise one or more optional 3′UTR element(s) and/or a poly(C) sequence as defined herein:
[0281] 5′UTR-ORF-histone stem-loop-3′; or
[0282] 5′UTR-ORF-ORF-histone stem-loop-3′; or
[0283] 5′ UTR-ORF-IRES-ORF-histone stem-loop-3′; or
[0284] 5′ UTR-ORF-histone stem-loop-poly(A) sequence-3′; or
[0285] 5′ UTR-ORF-histone stem-loop-polyadenylation signal-3′; or
[0286] 5′ UTR-ORF-ORF-histone stem-loop-polyadenylation signal-3′; or
[0287] 5′ UTR-ORF-histone stem-loop-histone stem-loop-3′; or
[0288] 5′ UTR-ORF-histone stem-loop-histone stem-loop-poly(A) sequence-3′; or
[0289] 5′ UTR-ORF-histone stem-loop-histone stem-loop-polyadenylation signal-3′; or
[0290] 5′ UTR-ORF-histone stem-loop-poly(A) sequence-histone stem-loop-3′; or
[0291] 5′ UTR-ORF-poly(A) sequence-histone stem-loop-3′; or
[0292] 5′ UTR-ORF-poly(A) sequence-histone stem-loop-histone stem-loop-3′; etc.

[0293] It is preferred that the above sequences comprise a poly(C) sequence. Preferably, this poly(C) sequence is located 5′ to the histone stem-loop, preferably between the poly(A) sequence and the histone stem-loop sequence.

[0294] In this context, it is particularly preferred that the inventive artificial nucleic acid molecule comprises or codes for a) a 5′UTR element, b) an open reading frame, preferably encoding a peptide or protein; c) at least one histone stem-loop, and d) a poly(A) sequence or polyadenylation sequence; preferably for increasing the expression level of an encoded protein, wherein the encoded protein is preferably no histone protein, no reporter protein (e.g. Luciferase, GFP, EGFP, 3-Galactosidase, particularly EGFP) and/or no marker or selection protein (e.g. alpha-Globin, Galactokinase and Xanthine:Guanine phosphoribosyl transferase (GPT)).

[0295] The open reading frame of the artificial nucleic acid molecule is not particularly limited. For example, the open reading frame may encode a protein or peptide that may be used for therapy of a disease. The particular choice of the protein or peptide depends on the disease to be treated and is not the subject of the invention. Accordingly, the artificial nucleic acid molecule may be for use in treatment of a disease that is treatable with the protein or peptide that is encoded by the open reading frame. The open reading frame may also encode a protein or peptide that may be used as an antigen for vaccination. Again, the particular choice of the protein or peptide depends on the disease or infection to be prevented. Accordingly, the artificial nucleic acid molecule may be for use in prevention of a disease by inducing a specific immune response.

[0296] However, the encoded protein is preferably no histone protein. In the context of the present invention, such a histone protein is typically a strongly alkaline protein found in eukaryotic cell nuclei, which package and order the DNA into structural units called nucleosomes. Histone proteins are the chief protein components of chromatin, act as spools around which DNA winds, and play a role in gene regulation. Without histones, the unwound DNA in chromosomes would be very long (a length to width ratio of more than 10 million to one in human DNA). For example, each human cell has about 1.8 meters of DNA, but wound on the histones it has about 90 milli-meters of chromatin, which, when duplicated and condensed during mitosis, result in about 120 micrometers of chromosomes. More preferably, in the context of the present invention, such a histone protein is typically defined as a highly conserved protein selected from one of the following five major classes of histones: H1/H5, H2A, H2B, H3, and H4”, preferably selected from mammalian histone, more preferably from human histones or histone proteins. Such histones or histone proteins are typically organised into two super-classes defined as core histones, comprising histones H2A, H2B, H3 and H4, and linker histones, comprising histones H1 and H5.

[0297] In this context, linker histones, are preferably excluded from the scope of protection of the pending invention, preferably mammalian linker histones, more preferably human linker histones, are typically selected from H1, including H1F, particularly including H1F0, H1FNT, H1FOO, H1FX, and H1H1, particularly including HIST1H1A, HIST1H1B, HIST1H1C, HIST1H1D, HIST1H1E, HIST1H1T.

[0298] Furthermore, in some embodiments, core histones which are preferably excluded from the scope of protection of the pending invention, preferably mammalian core histones, more preferably human core histones, are typically selected from H2A, including H2AF, particularly including H2AFB1, H2AFB2, H2AFBJ, H2AFJ, H2AFV, H2AFX, H2AFY, H2AFY2, H2AFZ, and H2A1, particularly including HIST1H2AA, HIST1H2AB, HIST1H2AC, HIST1H2AD, HIST1H2AE, HIST1H2AG, HIST1H2A1, HIST1H2AJ, HIST1H2AK, HIST1H2AL, HIST1H2AM, and H2A2, particularly including HIST2H2AA3, HIST2H2AC; H2B, including H2BF, particularly including H2BFM, H2BFO, H2BFS, H2BFWT H2B1, particularly including HIST1H2BA, HIST1H2BB, HIST1H2BC, HIST1H2BD, HIST1H2BE, HIST1H2BF, HIST1H2BG, HIST1H2BH, HIST1H2B1, HIST1H2BJ, HIST1H2BK, HIST1H2BL, HIST1H2BM, HIST1H2BN, HIST1H2BO, and H2B2, particularly including HIST2H2BE; H3, including H3A1, particularly including HISTIH3A, HIST1H3B, HIST1H3C, HIST1H3D, HIST1H3E, HIST1H3F, HIST1H3G, HIST1H3H, HIST1H3I, HIST1H3J, and H3A2, particularly including HIST2H3C, and H3A3, particularly including HIST3H3; H4, including H41, particularly including HIST1H4A, HIST1H4B, HIST1H4C, HIST1H4D, HIST1H4E, HIST1H4F, HIST1H4G, HIST1H4H, HIST1H4I, HIST1H4J, HIST1H4K, HIST1H4L, and H44, particularly including HIST4H4, and H5.

[0299] Preferably, the protein encoded by the open reading frame is no reporter protein (e.g. Luciferase, Green Fluorescent Protein (GFP), Enhanced Green Fluorescent Protein (EGFP), β-Galactosidase) and no marker or selection protein (e.g. alphα-globin, Galactokinase and Xan-thine:guanine phosphoribosyl transferase (GPT)). Preferably, the artificial nucleic acid molecule of the invention does not contain a (bacterial) Neo gene sequence (Neomycin resistance gene).

[0300] Preferably, the ORF does not code for a protein selected from the group consisting of albumin proteins, α-globin proteins, β-globin proteins, tyrosine hydroxylase proteins, lipoxygenase proteins, and collagen alpha proteins.

[0301] In a preferred embodiment, the open reading frame does not code for human albumin, provided that the 3′UTR element is identical to the 3′UTR of human albumin. In some further embodiment, it is preferred that the open reading frame does not code for human albumin according to GenBank Accession number NM_000477.5 provided that the 3′UTR element is identical to the 3′UTR of human albumin. In some further embodiments, it is preferred that the open reading frame does not code for human albumin or variants thereof provided that the 3′UTR element is a sequence which is identical to SEQ ID No. 1369 or to a corresponding RNA sequence.

[0302] Furthermore, in some embodiments, it is preferred that the open reading frame does not code for a reporter protein selected from the group consisting of globin proteins, luciferase proteins, GFP proteins or variants thereof, for example, variants exhibiting at least 70% sequence identity to a globin protein, a luciferase protein, or a GFP protein.

[0303] Preferably, the artificial nucleic acid molecule, preferably the open reading frame, is at least partially G/C modified. Thus, the inventive artificial nucleic acid molecule may be thermodynamically stabilized by modifying the G (guanosine)/C (cytidine) content of the molecule. The G/C content of the open reading frame of an artificial nucleic acid molecule according to the present invention may be increased compared to the G/C content of the open reading frame of a corresponding wild type sequence, preferably by using the degeneration of the genetic code. Thus, the encoded amino acid sequence of the nucleic acid molecule is preferably not modified by the G/C modification compared to the coded amino acid sequence of the particular wild type sequence. The codons of a coding sequence or a whole nucleic acid molecule, e.g. an mRNA, may therefore be varied compared to the wild type coding sequence, such that they include an increased amount of G/C nucleotides while the translated amino acid sequence is maintained. In respect to the fact that several codons code for one and the same amino acid (so-called degeneration of the genetic code), the most favourable codons for the stability can be determined (so-called alternative codon usage).

[0304] Depending on the amino acid to be encoded by the coding region of the inventive nucleic acid molecule as defined herein, there are various possibilities for modification of the nucleic acid sequence, e.g. the open reading frame, compared to its wild type coding region. In the case of amino acids which are encoded by codons which contain exclusively G or C nucleotides, no modification of the codon is necessary. Thus, the codons for Pro (CCC or CCG), Arg (CGC or CGG), Ala (GCC or GCG) and Gly (GGC or GGG) require no modification, since no A or U/T is present.

[0305] In contrast, codons which contain A and/or U/T nucleotides may be modified by substitution of other codons which code for the same amino acids but contain no A and/or U/T. For example the codons for Pro can be modified from CC(U/T) or CCA to CCC or CCG; the codons for Arg can be modified from CG(U/T) or CGA or AGA or AGG to CGC or CGG; the codons for Ala can be modified from GC(U/T) or GCA to GCC or GCG; the codons for Gly can be modified from GG(U/T) or GGA to GGC or GGG.

[0306] In other cases, although A or (U/T) nucleotides cannot be eliminated from the codons, it is however possible to decrease the A and (U/T) content by using codons which contain a lower content of A and/or (U/T) nucleotides. Examples of these are:

[0307] The codons for Phe can be modified from (U/T)(U/T)(U/T) to (U/T) (U/T)C; the codons for Leu can be modified from (U/T) (U/T)A, (U/T) (U/T)G, C(U/T) (U/T) or C(U/T)A to C(U/T)C or C(U/T)G; the codons for Ser can be modified from (U/T)C(U/T) or (U/T)CA or AG(U/T) to (U/T)CC, (U/T)CG or AGC; the codon for Tyr can be modified from (U/T)A(U/T) to (U/T)AC; the codon for Cys can be modified from (U/T)G(U/T) to (U/T)GC; the codon for His can be modified from CA(U/T) to CAC; the codon for Gln can be modified from CAA to CAG; the codons for Ile can be modified from A(U/T)(U/T) or A(U/T)A to A(U/T)C; the codons for Thr can be modified from AC(U/T) or ACA to ACC or ACG; the codon for Asn can be modified from AA(U/T) to AAC; the codon for Lys can be modified from AAA to AAG; the codons for Val can be modified from G(U/T)(U/T) or G(U/T)A to G(U/T)C or G(U/T)G; the codon for Asp can be modified from GA(U/T) to GAC; the codon for Glu can be modified from GAA to GAG; the stop codon (U/T)AA can be modified to (U/T)AG or (U/T)GA.

[0308] In the case of the codons for Met (A(U/T)G) and Trp ((U/T)GG), on the other hand, there is no possibility of sequence modification without altering the encoded amino acid sequence.

[0309] The substitutions listed above can be used either individually or in all possible combinations to increase the G/C content of the open reading frame of the inventive nucleic acid sequence as defined herein, compared to its particular wild type open reading frame (i.e. the original sequence). Thus, for example, all codons for Thr occurring in the wild type sequence can be modified to ACC (or ACG).

[0310] Preferably, the G/C content of the open reading frame of the inventive artificial nucleic acid molecule as defined herein is increased by at least 7%, more preferably by at least 15%, particularly preferably by at least 20%, compared to the G/C content of the wild type coding region. According to a specific embodiment at least 5%, 10%, 20%, 30%, 40%, 50%, 60%, more preferably at least 70%, even more preferably at least 80% and most preferably at least 90%, 95% or even 100% of the substitutable codons in the open reading frame of the inventive artificial nucleic acid molecule or a fragment, variant or derivative thereof are substituted, thereby increasing the G/C content of said open reading frame.

[0311] In this context, it is particularly preferable to increase the G/C content of the open reading frame of the inventive nucleic acid sequence as defined herein, to the maximum (i.e. 100% of the substitutable codons), compared to the wild type open reading frame.

[0312] Furthermore, the open reading frame is preferably at least partially codon-optimized. Codon-optimization is based on the finding that the translation efficiency may be determined by a different frequency in the occurrence of transfer RNAs (tRNAs) in cells. Thus, if so-called “rare codons” are present in the coding region of the inventive artificial nucleic acid molecule as defined herein, to an increased extent, the translation of the corresponding modified nucleic acid sequence is less efficient than in the case where codons coding for relatively “frequent” tRNAs are present.

[0313] Thus, the open reading frame of the inventive nucleic acid sequence is preferably modified compared to the corresponding wild type coding region such that at least one codon of the wild type sequence which codes for a tRNA which is relatively rare in the cell is exchanged for a codon which codes for a tRNA which is comparably frequent in the cell and carries the same amino acid as the relatively rare tRNA. By this modification, the open reading frame of the inventive artificial nucleic acid molecule as defined herein, is modified such that codons for which frequently occurring tRNAs are available may replace codons which correspond to rare tRNAs. In other words, according to the invention, by such a modification all codons of the wild type open reading frame which code for a rare tRNA may be exchanged for a codon which codes for a tRNA which is more frequent in the cell and which carries the same amino acid as the rare tRNA.

[0314] Which tRNAs occur relatively frequently in the cell and which, in contrast, occur relatively rare-ly is known to a person skilled in the art; cf. e.g. Akashi, Curr. Opin. Genet. Dev. 2001, 11(6): 660-666. Accordingly, preferably, the open reading frame is codon-optimized, preferably with respect to the system in which the nucleic acid molecule according to the present invention is to be expressed, preferably with respect to the system in which the nucleic acid molecule according to the present invention is to be translated. Preferably, the codon usage of the open reading frame is codon-optimized according to mammalian codon usage, more preferably according to human codon usage. Preferably, the open reading frame is codon-optimized and G/C-content modified.

[0315] For further improving degradation resistance, e.g. resistance to in vivo degradation by an exo- or endonuclease, and/or for further improving protein production from the artificial nucleic acid molecule according to the present invention, the artificial nucleic acid molecule may further comprise modifications, such as backbone modifications, sugar modifications and/or base modifications, e.g., lipid-modifications or the like. Preferably, the transcription and/or the translation of the artificial nucleic acid molecule according to the present invention is not significantly impaired by said modifications.

[0316] Nucleotide analogues/modifications that may be used in the context of the present invention may be selected, for example, from 2-amino-6-chloropurineriboside-5′-triphosphate, 2-amino-adenosine-5′-triphosphate, 2-thiocytidine-5′-triphosphate, 2-thiouridine-5′-triphosphate, 4-thiouridine-5′-triphosphate, 5-aminoallylcytidine-5′-triphosphate, 5-aminoallyluridine-5′-triphosphate, 5-bromocytidine-5′-triphosphate, 5-bromouridine-5′-triphosphate, 5-iodocytidine-5′-triphosphate, 5-iodouridine-5′-triphosphate, 5-methylcytidine-5′-triphosphate, 5-methyluridine-5′-triphosphate, 6-azacytidine-5′-triphosphate, 6-azauridine-5′-triphosphate, 6-chloropurineriboside-5′-triphosphate, 7-deazaadenosine-5′-triphosphate, 7-deazaguanosine-5′-triphosphate, 8-azaadenosine-5′-triphosphate, 8-azidoadenosine-5′-triphosphate, benzimidazole-riboside-5′-triphosphate, N1-methyladenosine-5′-triphosphate, N1-methylguanosine-5′-triphosphate, N6-methyladenosine-5′-triphosphate, 06-methylguanosine-5′-triphosphate, pseu-douridine-5′-triphosphate, or puromycin-5′-triphosphate, xanthosine-5′-triphosphate. Particular preference is given to nucleotides for base modifications selected from the group of base-modified nucleotides consisting of 5-methylcytidine-5′-triphosphate, 7-deazaguanosine-5′-triphosphate, 5-bromocytidine-5′-triphosphate, and pseudouridine-5′-triphosphate.

[0317] Further, lipid-modified artificial nucleic acid molecules may typically comprise at least one linker which is covalently linked with the artificial nucleic acid molecule, and at least one lipid which is covalently linked with this linker. Alternatively, a lipid-modified artificial nucleic acid molecule may comprise at least one artificial nucleic acid molecule as defined herein and at least one, preferably bifunctional lipid which is covalently linked, preferably without a linker, with that artificial nucleic acid molecule. According to a third alternative, a lipid-modified artificial nucleic acid molecule may comprise an artificial nucleic acid molecule as defined herein, at least one linker which is covalently linked with that artificial nucleic acid molecule, at least one lipid which is covalently linked with this linker, and additionally at least one, preferably bifunctional lipid which is covalently linked, preferably without a linker, with the artificial nucleic acid molecule.

[0318] In a further aspect, the present invention provides a vector comprising
[0319] (a.) at least one 5′-untranslated region element (5′UTR element) which comprises or consists of a nucleic acid sequence which is derived from the 5′UTR of a TOP gene or which is derived from a variant of the 5′UTR of a TOP gene;
[0320] (b.) at least one open reading frame and/or at least one cloning site; and
[0321] (c.) optionally, at least one histone stem-loop.

[0322] The cloning site may be suitable for accepting an open reading frame, i.e. an open reading frame coding for a protein or peptide to be expressed may be cloned into the vector via the cloning site.

[0323] The at least one 5′UTR element, the at least one ORF, and the at least one optional histone stem-loop are as described herein for the artificial nucleic acid molecule according to the present invention. The cloning site may be any sequence that is suitable for introducing an open reading frame or a sequence comprising an open reading frame, such as one or more restriction sites.

[0324] Thus, the vector comprising a cloning site is preferably suitable for inserting an open reading frame into the vector. Preferably, it may be suitable for inserting an open reading frame between the 5′UTR element and a desired 3′ structure such as a histone stem loop, a polyl(A) sequence, a polyadenylation signal and/or a 3′UTR element, more preferably it is suitable for insertion 5′ to the 3′ structure and 3′ to the 5′UTR element. For example the 3′ structure may comprise a histone stem-loop, a poly(A) sequence or a polyadenylation signal and/or a 3′UTR element as described above. Thereby the histone stem loop, the poly(A) sequence and/or the polyadenylation signal and the 3′UTR element may occur in any order that may be desired.

[0325] Preferably, the cloning site or the ORF is located 5′ to the 3′UTR structure, preferably in close proximity to the 5′-end of the histone stem-loop, poly(A) sequence, polyadenylation signal and/or a 3′UTR element as described above. For example, the cloning site or the ORF may be directly connected to the 5′-end of the histone stem-loop, poly(A) sequence, polyadenylation signal and/or a 3′UTR element or they may be connected via a stretch of nucleotides, such as by a stretch of 2, 4, 6, 8, 10, 20 etc. nucleotides as described above for the artificial nucleic acid molecule according to the present invention. Preferably, the cloning site or the ORF is located 3′ to the 5′UTR element, preferably in close proximity to the 3′-end of the 5′UTR element. For example, the cloning site or the ORF may be directly connected to the 3′-end of the 5′UTR element or they may be connected via a stretch of nucleotides, such as by a stretch of 2, 4, 6, 8, 10, 20 etc. nucleotides as described above for the artificial nucleic acid molecule according to the present invention.

[0326] Preferably, the vector according to the present invention is suitable for producing the artificial nucleic acid molecule according to the present invention, preferably for producing an artificial mRNA according to the present invention, for example, by optionally inserting an open reading frame or a sequence comprising an open reading frame into the vector and transcribing the vector. Thus, preferably, the vector comprises elements needed for transcription, such as a promoter, e.g. an RNA polymerase promoter. Preferably, the vector is suitable for transcription using eukaryotic, prokaryotic, viral or phage transcription systems, such as eukaryotic cells, prokaryotic cells, or eukaryotic, prokaryotic, viral or phage in vitro transcription systems. Thus, for example, the vector may comprise a promoter sequence, which is recognizes by a polymerase, such as by an RNA polymerase, e.g. by a eukaryotic, prokaryotic, viral, or phage RNA polymerase. In a preferred embodiment, the vector comprises a phage RNA polymerase promoter such as an SP6 or T7, preferably a T7 promoter. Preferably, the vector is suitable for in vitro transcription using a phage based in vitro transcription system, such as a T7 RNA polymerase based in vitro transcription system.

[0327] The vector may further comprise a poly(A) sequence and/or a polyadenylation signal and/or a poly(C) sequence as described above for the artificial nucleic acid molecule according to the present invention.

[0328] The vector may be an RNA vector or a DNA vector. Preferably, the vector is a DNA vector. The vector may be any vector known to the skilled person, such as a viral vector or a plasmid vector. Preferably, the vector is a plasmid vector, preferably a DNA plasmid vector.

[0329] In a preferred embodiment, the vector according to the present invention comprises or codes for the artificial nucleic acid molecule according to the present invention. Preferably, a vector according to the present invention comprises a sequence according to SEQ ID NOs. 1-1363, SEQ ID NO. 1435, SEQ ID NO. 1461, SEQ ID NO. 1462, or a sequence according to SEQ ID NOs. 1368 or 1452-1460, a fragment thereof as described above, or a corresponding RNA sequence, or a sequence having an identity of at least about 40%, preferably of at least about 50%, preferably of at least about 60%, preferably of at least about 70%, more preferably of at least about 80%, more preferably of at least about 90%, even more preferably of at least about 95%; even more preferably of at least about 99% to a sequence according to any one of SEQ ID NOs. 1-1363, SEQ ID NO. 1435, SEQ ID NO. 1461, SEQ ID NO. 1462, or a sequence according to SEQ ID NOs. 1368 or 1452-1460, a fragment thereof as described above, preferably a functional fragment thereof, or a corresponding RNA sequence.

[0330] Preferably, a vector according to the present invention comprises a sequence according to any one of SEQ ID Nos. 1369-1390 and 1434, a fragment thereof as described above or a corresponding RNA sequence, or a sequence having an identity of at least about 40%, preferably of at least about 50%, preferably of at least about 60%, preferably of at least about 70%, more preferably of at least about 80%, more preferably of at least about 90%, even more preferably of at least about 95%; even more preferably of at least about 99% to a sequence according to any one of SEQ ID Nos. 1369-1390 and 1434 or a fragment thereof as described above, preferably a functional fragment thereof, or a corresponding RNA sequence.

[0331] Preferably, a vector according to the present invention comprises a sequence according to any one of SEQ ID Nos. 1391-1433 or a corresponding RNA sequence, or a sequence having an identity of at least about 75%, preferably of at least about 80%, more preferably of at least about 85%, even more preferably of at least about 90%; even more preferably of at least about 95% to a sequence according to SEQ ID Nos. 1433 as described above or a corresponding RNA sequence.

[0332] Preferably, the vector is a circular molecule. Preferably, the vector is a double-stranded molecule, such as a double stranded DNA molecule. Such circular, preferably double stranded DNA molecule may be used conveniently as a storage form for the inventive artificial nucleic acid molecule. Furthermore, it may be used for transfection of cells, for example, cultured cells. Also it may be used for in vitro transcription for obtaining an artificial RNA molecule according to the invention.

[0333] Preferably, the vector, preferably the circular vector, is linearizable, for example, by restriction enzyme digestion. In a preferred embodiment, the vector comprises a cleavage site, such as a restriction site, preferably a unique cleavage site, located immediately 3′ to the open reading frame or—if present—to the histone stem-loop, or—if present—to the poly(A) sequence or the polyadenylation signal, or—if present—to the 3′UTR element, or—if present—to the poly(C) sequence. Thus, preferably, the product obtained by linearizing the vector terminates at the 3′end with the 3′-end of the open reading frame, or—if present—with the 3′-end of the histone stem loop, or—if present—with the 3′-end of the poly(A) sequence or the 3′-end of the polyadenylation signal, or—if present—with the 3′-end of a 3′UTR element, plus some optional nucleotides, e.g. remaining from the restriction site after cleavage.

[0334] In a further aspect, the present invention relates to a cell comprising the artificial nucleic acid molecule according to the present invention or the vector according to the present invention. The cell may be any cell, such as a bacterial cell, insect cell, plant cell, vertebrate cell, e.g. a mammalian cell. Such cell may be, e.g., used for replication of the vector of the present invention, for example, in a bacterial cell. Furthermore, the cell may be used for transcribing the artificial nucleic acid molecule or the vector according to the present invention and/or translating the open reading frame of the artificial nucleic acid molecule or the vector according to the present invention. For example, the cell may be used for recombinant protein production.

[0335] The cells according to the present invention are, for example, obtainable by standard nucleic acid transfer methods, such as standard transfection methods. For example, the artificial nucleic acid molecule or the vector according to the present invention may be transferred into the cell by electroporation, lipofection, e.g. based on cationic lipids and/or liposomes, calcium phosphate precipitation, nanoparticle based transfection, virus based transfection, or based on cationic polymers, such as DEAE-dextran or polyethylenimine etc.

[0336] Preferably, the cell is a mammalian cell, such as a cell of a human subject, a domestic animal, a laboratory animal, such as a mouse or rat cell. Preferably the cell is a human cell. The cell may be a cell of an established cell line, such as a CHO, BHK, 293T, COS-7, HELA, HEK etc. cell, or the cell may be a primary cell, such as a HDF cell, preferably a cell isolated from an organism. In a preferred embodiment, the cell is an isolated cell of a mammalian subject, preferably of a human subject. For example, the cell may be an immune cell, such as a dendritic cell, a cancer or tumor cell, or any somatic cell etc., preferably of a mammalian subject, preferably of a human subject.

[0337] In a further aspect, the present invention provides a pharmaceutical composition comprising the artificial nucleic acid molecule according to the present invention, the vector according the present invention, or the cell according to the present invention. The pharmaceutical composition according to the invention may be used, e.g., as a vaccine, for example, for genetic vaccination. Thus, the ORF may, e.g., encode an antigen to be administered to a patient for vaccination. Thus, in a preferred embodiment, the pharmaceutical composition according to the present invention is a vaccine. Furthermore, the pharmaceutical composition according to the present invention may be used, e.g., for gene therapy.

[0338] Preferably, the pharmaceutical composition further comprises one or more pharmaceutically acceptable excipients, vehicles, fillers and/or diluents. In the context of the present invention, a pharmaceutically acceptable vehicle typically includes a liquid or non-liquid basis for the inventive pharmaceutical composition. In one embodiment, the pharmaceutical composition is provided in liquid form. In this context, preferably, the vehicle is based on water, such as pyrogen-free water, isotonic saline or buffered (aqueous) solutions, e.g phosphate, citrate etc. buffered solutions. The buffer may be hypertonic, isotonic or hypotonic with reference to the specific reference medium, i.e. the buffer may have a higher, identical or lower salt content with reference to the specific reference medium, wherein preferably such concentrations of the afore mentioned salts may be used, which do not lead to damage of mammalian cells due to osmosis or other con-centration effects. Reference media are e.g. liquids occurring in “in vivo” methods, such as blood, lymph, cytosolic liquids, or other body liquids, or e.g. liquids, which may be used as reference media in “in vitro” methods, such as common buffers or liquids. Such common buffers or liquids are known to a skilled person. Ringer-Lactate solution is particularly preferred as a liquid basis.

[0339] One or more compatible solid or liquid fillers or diluents or encapsulating compounds suitable for administration to a patient may be used as well for the inventive pharmaceutical composition. The term “compatible” as used herein preferably means that these components of the inventive pharmaceutical composition are capable of being mixed with the inventive nucleic acid, vector or cells as defined herein in such a manner that no interaction occurs which would substantially reduce the pharmaceutical effectiveness of the inventive pharmaceutical composition under typi-cal use conditions.

[0340] The pharmaceutical composition according to the present invention may optionally further comprise one or more additional pharmaceutically active components. A pharmaceutically active component in this context is a compound that exhibits a therapeutic effect to heal, ameliorate or prevent a particular indication or disease. Such compounds include, without implying any limita-tion, peptides or proteins, nucleic acids, (therapeutically active) low molecular weight organic or inorganic compounds (molecular weight less than 5000, preferably less than 1000), sugars, antigens or antibodies, therapeutic agents already known in the prior art, antigenic cells, antigenic cellular fragments, cellular fractions, cell wall components (e.g. polysaccharides), modified, attenuated or de-activated (e.g. chemically or by irradiation) pathogens (virus, bacteria etc.).

[0341] Furthermore, the inventive pharmaceutical composition may comprise a carrier for the artificial nucleic acid molecule or the vector. Such a carrier may be suitable for mediating dissolution in physiological acceptable liquids, transport and cellular uptake of the pharmaceutical active artificial nucleic acid molecule or the vector. Accordingly, such a carrier may be a component which may be suitable for depot and delivery of an artificial nucleic acid molecule or vector according to the invention. Such components may be, for example, cationic or polycationic carriers or compounds which may serve as transfection or complexation agent.

[0342] Particularly preferred transfection or complexation agents in this context are cationic or polycationic compounds, including protamine, nucleoline, spermine or spermidine, or other cationic peptides or proteins, such as poly-L-lysine (PLL), poly-arginine, basic polypeptides, cell penetrating peptides (CPPs), including HIV-binding peptides, HIV-1 Tat (HIV), Tat-derived peptides, Penetratin, VP22 derived or analog peptides, HSV VP22 (Herpes simplex), MAP, KALA or protein transduction domains (PTDs), PpT620, prolin-rich peptides, arginine-rich peptides, lysine-rich peptides, MPG-peptide(s), Pep-1, L-oligomers, Calcitonin peptide(s), Antennapedia-derived peptides (particularly from Drosophila antennapedia), pAntp, plsl, FGF, Lactoferrin, Transportan, Buforin-2, Bac715-24, SynB, SynB(1), pVEC, hCT-derived peptides, SAP, or histones.

[0343] Furthermore, such cationic or polycationic compounds or carriers may be cationic or polycationic peptides or proteins, which preferably comprise or are additionally modified to comprise at least one —SH moiety. Preferably, a cationic or polycationic carrier is selected from cationic peptides having the following sum formula (III):

[chemical structure]

wherein 1+m+n+o+x=3-100, and 1, m, n or o independently of each other is any number selected from 0, 1, 2, 3, 4, 5, 6, 7, 8, 9, 10, 11, 12, 13, 14, 15, 16, 17, 18, 19, 20, 21-30, 31-40, 41-50, 51-60, 61-70, 71-80, 81-90 and 91-100 provided that the overall content of Arg (Arginine), Lys (Lysine), His (Histidine) and Orn (Ornithine) represents at least 10% of all amino acids of the oligopeptide; and Xaa is any amino acid selected from native (=naturally occurring) or non-native amino acids except of Arg, Lys, His or Orn; and x is any number selected from 0, 1, 2, 3, 4, 5, 6, 7, 8, 9, 10, 11, 12, 13, 14, 15, 16, 17, 18, 19, 20, 21-30, 31-40, 41-50, 51-60, 61-70, 71-80, 81-90, provided, that the overall content of Xaa does not exceed 90% of all amino acids of the oligopeptide. Any of amino acids Arg, Lys, His, Orn and Xaa may be positioned at any place of the peptide. In this context cationic peptides or proteins in the range of 7-30 amino acids are particular preferred.

[0344] Further, the cationic or polycationic peptide or protein, when defined according to formula {(Arg)ₗ;(Lys)ₘ;(His)ₙ;(Orn)ₒ;(Xaa)ₓ}(formula (III)) as shown above and which comprise or are additionally modified to comprise at least one —SH moeity, may be, without being restricted thereto, selected from subformula (IIIa):

[chemical structure]

wherein (Arg)ₗ;(Lys)ₘ;(His)ₙ;(Orn)ₒ; and x are as defined herein, Xaa′ is any amino acid selected from native (=naturally occurring) or non-native amino acids except of Arg, Lys, His, Orn or Cys and y is any number selected from 0, 1, 2, 3, 4, 5, 6, 7, 8, 9, 10, 11, 12, 13, 14, 15, 16, 17, 18, 19, 20, 21-30, 31-40, 41-50, 51-60, 61-70, 71-80 and 81-90, provided that the overall content of Arg (Arginine), Lys (Lysine), His (Histidine) and Orn (Ornithine) represents at least 10% of all amino acids of the oligopeptide. Further, the cationic or polycationic peptide may be selected from subformula (IIIb):

[chemical structure]

wherein empirical formula {(Arg)ₗ;(Lys)ₘ;(His)ₙ;(Orn)ₒ;(Xaa)ₓ}(formula (III)) is as defined herein and forms a core of an amino acid sequence according to (semiempirical) formula (III) and wherein Cys₁ and Cys₂ are Cysteines proximal to, or terminal to (Arg)ₗ;(Lys)ₘ;(His)ₙ;(Orn)ₒ;(Xaa)_{x.}

[0345] Further preferred cationic or polycationic compounds, which can be used as transfection or complexation agent may include cationic polysaccharides, for example chitosan, polybrene, cationic polymers, e.g. polyethyleneimine (PEI), cationic lipids, e.g. DOTMA: [1-(2,3-sioleyloxy)propyl)]-N,N,N-trimethylammonium chloride, DMRIE, di-C14-amidine, DOTIM, SAINT, DC-Chol, BGTC, CTAP, DOPC, DODAP, DOPE: Dioleyl phosphatidylethanol-amine, DOSPA, DODAB, DOIC, DMEPC, DOGS: Dioctadecylamidoglicylspermin, DIMRI: Dimyristo-oxypropyl dimethyl hydroxyethyl ammonium bromide, DOTAP: dioleoyloxy-3-(trimethylammonio)propane, DC-6-14: O,O-ditetradecanoyl-N-(α-trimethylammonioacetyl)diethanolamine chloride, CLIP 1: rac-[(2,3-dioctadecyloxypropyl)(2-hydroxyethyl)]-dimethylammonium chloride, CLIP6: rac-[2(2,3-dihexadecyloxypropyl-oxymethyloxy)ethyl]trimethylammonium, CLIP9: rac-[2(2,3-dihexadecyloxypropyl-oxysuccinyloxy)ethyl]-trimethylammonium, oligofectamine, or cationic or polycationic polymers, e.g. modified polyaminoacids, such as β-aminoacid-polymers or reversed polyamides, etc., modified polyethylenes, such as PVP (poly(N-ethyl-4-vinylpyridinium bromide)), etc., modified acry-lates, such as pDMAEMA (poly(dimethylaminoethyl methylacrylate)), etc., modified Amidoam-ines such as pAMAM (poly(amidoamine)), etc., modified polybetaaminoester (PBAE), such as diamine end modified 1,4 butanediol diacrylate-co-5-amino-1-pentanol polymers, etc., dendrimers, such as polypropylamine dendrimers or pAMAM based dendrimers, etc., polyimine(s), such as PEI: poly(ethyleneimine), poly(propyleneimine), etc., polyallylamine, sugar backbone based polymers, such as cyclodextrin based polymers, dextran based polymers, chitosan, etc., silan backbone based polymers, such as PMOXA-PDMS copolymers, etc., blockpolymers consisting of a combination of one or more cationic blocks (e.g. selected from a cationic polymer as mentioned above) and of one or more hydrophilic or hydrophobic blocks (e.g polyethyleneglycole); etc.

[0346] In this context, it is particularly preferred that the inventive artificial nucleic acid molecule or the inventive vector is complexed at least partially with a cationic or polycationic compound, preferably cationic proteins or peptides. Partially means that only a part of the inventive artificial nucleic acid molecule or the inventive vector is complexed with a cationic or polycationic compound and that the rest of the inventive artificial nucleic acid molecule or the inventive vector is in un-complexed form (“free”). Preferably the ratio of complexed nucleic acid to: free nucleic acid is selected from a range. of about 5:1 (w/w) to about 1:10 (w/w), more preferably from a range of about 4:1 (w/w) to about 1:8 (w/w), even more preferably from a range of about 3:1 (w/w) to about 1:5 (w/w) or 1:3 (w/w), and most preferably the ratio of complexed nucleic acid to free nucleic acid is selected from a ratio of about 1:1 (w/w).

[0347] The pharmaceutical composition according to the present invention may optionally further comprise one or more adjuvants, for example, adjuvants for stimulating the innate immune system or for enhancing cellular uptake of the artificial nucleic acid molecule or vector. In this context, an adjuvant may be understood as any compound, which is suitable to initiate or increase an immune response of the innate immune system, i.e. a non-specific immune response. In other words, when administered, the inventive pharmaceutical composition preferably elicits an innate immune response due to the adjuvant, optionally contained therein. Preferably, such an adjuvant may be an adjuvant supporting the induction of an innate immune response in a mammal. Such an adjuvant may be, for example, an immunostimulatory nucleic acid, i.e. a nucleic acid that may bind to a Toll-like-receptor or the like, preferably an immunostimulatory RNA. Such adjuvants, preferably such immunostimulatory nucleic acids, may induce an innate, i.e. unspecific, immune response which may support a specific, i.e. adaptive, immune response to the peptide or protein, i.e. the antigen, encoded by the artificial nucleic acid molecule of the pharmaceutical composition, preferably the vaccine.

[0348] The inventive pharmaceutical composition may also additionally comprise any further compound, which is known to be immunostimulating due to its binding affinity (as ligands) to human Toll-like receptors TLR1, TLR2, TLR3, TLR4, TLR5, TLR6, TLR7, TLR8, TLR9, TLR10, or due to its binding affinity (as ligands) to murine Toll-like receptors TLR1, TLR2, TLR3, TLR4, TLR5, TLR6, TLR7, TLR8, TLR9, TLR10, TLR11, TLR12 or TLR13.

[0349] Further additives which may be included in the inventive pharmaceutical composition are, e.g., emulsifiers, such as, for example, Tween®; wetting agents, such as, for example, sodium lauryl sulfate; colouring agents; taste-imparting agents, pharmaceutical carriers; tablet-forming agents; stabilizers; antioxidants; preservatives etc.

[0350] The pharmaceutical composition according to the present invention preferably comprises a “safe and effective amount” of the components of the pharmaceutical composition, particularly of the inventive nucleic acid sequence, the vector and/or the cells as defined herein. As used herein, a “safe and effective amount” means an amount sufficient to significantly induce a positive modification of a disease or disorder as defined herein. At the same time, however, a “safe and effective amount” preferably avoids serious side-effects and permits a sensible relationship between advantage and risk. The determination of these limits typically lies within the scope of sensible medical judgment.

[0351] In a further aspect, the present invention provides the artificial nucleic acid molecule according to the present invention, the vector according to the present invention, the cell according to the present invention, or the pharmaceutical composition according to the present invention for use as a medicament, for example, as vaccine (in genetic vaccination) or in gene therapy.

[0352] The artificial nucleic acid molecule according to the present invention, the vector according to the present invention, the cell according to the present invention, or the pharmaceutical composition according to the present invention are particularly suitable for any medical application which makes use of the therapeutic action or effect of peptides, polypeptides or proteins, or where supplementation of a particular peptide or protein is needed. Thus, the present invention provides the artificial nucleic acid molecule according to the present invention, the 100805391 92 vector according to the present invention, the cell according to the present invention, or the pharmaceutical composition according to the present invention for use in the treatment or prevention of diseases or disorders amenable to treatment by the therapeutic action or effect of peptides, polypeptides or proteins or amenable to treatment by supplementation of a particular peptide, polypeptide or protein. For example, the artificial nucleic acid molecule according to the present invention, the vector according to the present invention, the cell according to the present invention, or the pharmaceutical composition according to the present invention may be used for the treatment or prevention of genetic diseases, autoimmune diseases, cancerous or tumour-related diseases, infectious diseases, chronic diseases or the like, e.g., by genetic vaccination or gene therapy.

[0353] In particular, such therapeutic treatments which benefit from a stable, prolonged and/or increased presence of therapeutic peptides, polypeptides or proteins in a subject to be treated are especially suitable as medical application in the context of the present invention, since the 5′UTR element in particular in combination with a histone stem-loop provides for increased protein expression from the ORF of the inventive nucleic acid molecule. Thus, a particularly suitable medical application for the artificial nucleic acid molecule according to the present invention, the vector according to the present invention, the cell according to the present invention, or the pharmaceutical composition according to the present invention is vaccination, for example against infections or tumours. Thus, the present invention provides the artificial nucleic acid molecule according to the present invention, the vector according to the present invention, the cell according to the present invention, or the pharmaceutical composition according to the present invention for vaccination of a subject, preferably a mammalian subject, more preferably a human subject. Preferred vaccination treatments are vaccination against infectious diseases, such as bacterial, protozoal or viral infections, and anti-tumour-vaccination. Such vaccination treatments may be prophylactic or therapeutic.

[0354] Depending on the disease to be treated or prevented, the ORF may be selected. For example, the open reading frame may code for a protein that has to be supplied to a patient suffering from total lack or at least partial loss of function of a protein, such as a patient suffering from a genetic disease. Additionally, the open reading frame may be chosen from an ORF coding for a peptide or protein which beneficially influences a disease or the condition of a subject. Furthermore, the open reading frame may code for a peptide or protein which effects down-regulation of a pathological overproduction of a natural peptide or protein or elimination of cells expressing pathologically a protein or peptide. Such lack, loss of function or overproduction may, e.g., occur in the context of tumour and neoplasia, autoimmune diseases, allergies, infections, chronic diseases or the like. Furthermore, the open reading frame may code for an antigen or immunogen, e.g. for an epitope of a pathogen or for a tumour antigen. Thus, in preferred embodiments, the artificial nucleic acid molecule or the vector according to the present invention comprises an ORF encoding an amino acid sequence comprising or consisting of an antigen or immunogen, e.g. an epitope of a pathogen or a tumour-associated antigen, a 5′UTR element as described above, preferably a histone stem-loop as described herein, and optional further components, such as a 3′UTR element and/or a poly(A) sequence and/or a poly(C) sequence etc. as described herein.

[0355] In the context of medical application, in particular, in the context of vaccination, it is preferred that the artificial nucleic acid molecule according to the present invention is RNA, preferably mRNA, since DNA harbours the risk of eliciting an anti-DNA immune response and tends to insert into genomic DNA. However, in some embodiments, for example, if a viral delivery vehicle, such as an adenoviral delivery vehicle is used for delivery of the artificial nucleic acid molecule or the vector according to the present invention, e.g., in the context of gene therapeutic treatments, it may be desirable that the artificial nucleic acid molecule or the vector is a DNA molecule.

[0356] The artificial nucleic acid molecule according to the present invention, the vector according to the present invention, the cell according to the present invention, or the pharmaceutical composition according to the present invention may be administered orally, parenterally, by inhalation spray, topically, rectally, nasally, buccally, vaginally or via an implanted reservoir. The term parenteral as used herein includes subcutaneous, intravenous, intramuscular, intra-articular, in-tra-synovial, intrasternal, intrathecal, intrahepatic, intralesional, intracranial, transdermal, intradermal, intrapulmonal, intraperitoneal, intracardial, intraarterial, and sublingual injection or infusion techniques.

[0357] Preferably, the artificial nucleic acid molecule according to the present invention, the vector according to the present invention, the cell according to the present invention, or the pharmaceutical composition according to the present invention is administered parenterally, e.g. by parenteral injection, more preferably by subcutaneous, intravenous, intramuscular, intra-articular, intra-synovial, intrasternal, intrathecal, intrahepatic, intralesional, intracranial, transdermal, intradermal, intrapulmonal, intraperitoneal, intracardial, intraarterial, sublingual injection or via infusion techniques. Particularly preferred is intradermal and intramuscular injection. Sterile injectable forms of the inventive pharmaceutical composition may be aqueous or oleaginous suspension. These suspensions may be formulated according to techniques known in the art using suitable dispersing or wetting agents and suspending agents.

[0358] The artificial nucleic acid molecule according to the present invention, the vector according to the present invention, the cell according to the present invention, or the pharmaceutical composition according to the present invention may also be administered orally in any orally acceptable dosage form including, but not limited to, capsules, tablets, aqueous suspensions or solutions.

[0359] The artificial nucleic acid molecule according to the present invention, the vector according to the present invention, the cell according to the present invention, or the pharmaceutical composition according to the present invention may also be administered topically, especially when the target of treatment includes areas or organs readily accessible by topical application, e.g. including diseases of the skin or of any other accessible epithelial tissue. Suitable topical formulations are readily prepared for each of these areas or organs. For topical applications, the artificial nucleic acid molecule according to the present invention, the vector according to the present invention, the cell according to the present invention, or the pharmaceutical composition according to the present invention may be formulated in a suitable ointment suspended or dissolved in one or more carriers.

[0360] In one embodiment, the use as a medicament comprises the step of transfection of mammalian cells, preferably in vitro transfection of mammalian cells, more preferably in vitro transfection of isolated cells of a subject to be treated by the medicament. If the use comprises the in vitro transfection of isolated cells, the use as a medicament may further comprise the (re)administration of the transfected cells to the patient. The use of the inventive artificial nucleic acid molecules or the vector as a medicament may further comprise the step of selection of successfully transfected isolated cells. Thus, it may be beneficial if the vector further comprises a selection marker. Also, the use as a medicament may comprise in vitro transfection of isolated cells and purification of an expression-product, i.e. the encoded peptide or protein from these cells. This purified peptide or protein may subsequently be administered to a subject in need thereof.

[0361] The present invention also provides a method for treating or preventing a disease or disorder as described above comprising administering the artificial nucleic acid molecule according to the present invention, the vector according to the present invention, the cell according to the present invention, or the pharmaceutical composition according to the present invention to a subject in need thereof.

[0362] Furthermore, the present invention provides a method for treating or preventing a disease or disorder comprising transfection of a cell with an artificial nucleic acid molecule according to the present invention or with the vector according to the present invention. Said transfection may be performed in vitro or in vivo. In a preferred embodiment, transfection of a cell is performed in vitro and the transfected cell is administered to a subject in need thereof, preferably to a human patient. Preferably, the cell which is to be transfected in vitro is an isolated cell of the subject, preferably of the human patient. Thus, the present invention provides a method of treatment comprising the steps of isolating a cell from a subject, preferably from a human patient, transfecting the isolated cell with the artificial nucleic acid molecule according to the present invention or the vector according to the present invention, and administering the transfected cell to the subject, preferably the human patient.

[0363] The method of treating or preventing a disorder according to the present invention is preferably a vaccination method and/or a gene therapy method as described above.

[0364] As described above, the 5′UTR element, preferably, the histone stem-loop, and optionally the poly(A)sequence and/or the 3′UTR element are capable of increasing protein production from an artificial nucleic acid molecule, such as an mRNA or vector, comprising these elements and an ORF, preferably in an at least additive, preferably in a synergistic manner. Thus, in a further aspect, the present invention relates to a method for increasing protein production from an artificial nucleic acid molecule comprising the step of associating the artificial nucleic acid molecule, preferably an ORF contained within the artificial nucleic acid molecule, with (i) at least one 5′-untranslated region element (5′UTR element) which comprises or consists of a nucleic acid sequence which is derived from the 5′UTR of a TOP gene or which is derived from a variant of the 5′UTR of a TOP gene as described above, preferably (ii) at least one histone stem-loop as described herein, and optionally one or more futher elements, such as a poly(A)sequence and/or polyadenylation signal, and/or a poly(C) sequence, and/or a 3′UTR element, which comprises or consists of a nucleic acid sequence derived from the 3′UTR of a chordate gene, preferably a vertebrate gene, more preferably a mammalian gene, most preferably a human gene, or from a variant of the 3′UTR of a chordate gene, preferably a vertebrate gene, more preferably a mammalian gene, most preferably a human gene as described above.

[0365] Associating the artificial nucleic acid molecule or the vector with a 5 ′UTR element and preferably a histone stem-loop as well as optional further elements in the context of the present invention preferably means functionally associating or functionally combining an artificial nucleic acid molecule, e.g. comprising an ORF, such as an mRNA or a vector, with the 5′UTR element and optionally the histone stem-loop and/or the poly(A) sequence and/or the 3′UTR element. This means that the artificial nucleic acid molecule, preferably the ORF contained within the artificial nucleic acid molecule, the 5′UTR element and preferably the histone stem-loop and the optional further elements, such as the poly(A)sequence and/or the 3′UTR element as described above, are associated or coupled such that the function of the 5′UTR element and the histone stem-loop and the optional further elements, e.g. protein production increasing function, is exerted. Typically, this means that the 5′UTR element and the histone stem-loop and optionally the poly(A)sequence and/or the 3′UTR element are integrated into the artificial nucleic acid molecule, preferably into the mRNA molecule or the vector, such that the open reading frame is positioned between the 5′UTR element and the optional histone stem-loop and the optional poly(A)sequence and/or the optional 3′UTR element.

[0366] The product of said method is preferably the artificial nucleic acid molecule according to the present invention or the vector according to the present invention. Thus, e.g. the nature and sequence of the elements, such as the 5′UTR element, the histone stem-loop, the poly(A) sequence, the polyadenylation signal, the poly(C) sequence, and the 3′UTR element are as described above for the artificial nucleic acid molecule according to the present invention or the vector according to the present invention.

[0367] In a further aspect, the present invention provides the use of at least one 5′-untranslated region element (5′UTR element) which comprises or consists of a nucleic acid sequence which is derived from the 5′UTR of a TOP gene or which is derived from a variant of the 5′UTR of a TOP gene as described above, preferably at least one histone stem-loop, and optionally further elements, such as a poly(A)sequence and/or a polyadenylation signal, and/or a poly(C) signal), and/or a 3′UTR element which comprises or consists of a nucleic acid sequence derived from the 3′UTR of a chordate gene, preferably a vertebrate gene, more preferably a mammalian gene, most preferably a human gene, or from a variant of the 3′UTR of a chordate gene, preferably a vertebrate gene, more preferably a mammalian gene, most preferably a human gene as described above for increasing protein production from an artificial nucleic acid molecule, such as an mRNA or a vector.

[0368] The use according to the present invention preferably comprises associating the artificial nucleic acid molecule with the 5′UTR element, preferably the histone stem-loop and optional further elements, such as a poly(A)sequence or 3′UTR element etc., as described above.

[0369] The compounds and ingredients of the inventive pharmaceutical composition may also be manufactured and traded separately of each other. Thus, the invention relates further to a kit or kit of parts comprising an artificial nucleic acid molecule according to the invention, a vector according to the present invention, a cell according to the invention, and/or a pharmaceutical composition according to the invention. Preferably, such kit or kit of parts may, additionally, comprise instructions for use, cells for transfection, an adjuvant, a means for administration of the pharmaceutical composition, a pharmaceutically acceptable carrier and/or an pharmaceutically acceptable solution for dissolution or dilution of the artificial nucleic acid molecule, the vector, the cells or the pharmaceutical composition.

[0370] The following Figures, Sequences and Examples are intended to illustrate the invention further. They are not intended to limit the subject-matter of the invention thereto.

[0371] FIG. 1: shows the histone stem-loop consensus sequence generated from metazoan and protozoan stem-loop sequences (as reported by DAvila Lopez, M., & Samuelsson, T. (2008), RNA (New York, N.Y.), 14(1), 1-10. doi:10.1261/rna.782308). 4001 histone stem-loop sequences from metazoa and protozoa were aligned and the quantity of the occurring nucleotides is indicated for every position in the stem-loop sequence. The generated consensus sequence representing all nucleotides present in the sequences analyzed is given using the single-letter nucleotide code. In addition to the consensus sequence, sequences are shown representing at least 99%, 95% and 90% of the nucleotides present in the sequences analyzed.

[0372] FIG. 2: shows the histone stem-loop consensus sequence generated from protozoan stem-loop sequences (as reported by Dávila López, M., & Samuelsson, T. (2008), RNA (New York, N.Y.), 14(1), 1-10. doi:10.1261/rna.782308). 131 histone stem-loop sequences from protozoa were aligned and the quantity of the occurring nucleotides is indicated for every position in the stem-loop sequence. The generated consensus sequence representing all nucleotides present in the sequences analyzed is given using the single-letter nucleotide code. In addition to the consensus sequence, sequences are shown representing at least 99%, 95% and 90% of the nucleotides present in the sequences analyzed.

[0373] FIG. 3: shows the histone stem-loop consensus sequence generated from metazoan stem-loop sequences (as reported by DAvila Lopez, M., & Samuelsson, T. (2008), RNA (New York, N.Y.), 14(1), 1-10. doi:10.1261/rna.782308). 3870 histone stem-loop sequences from metazoa were aligned and the quantity of the occurring nucleotides is indicated for every position in the stem-loop sequence. The generated consensus sequence representing all nucleotides present in the sequences analyzed is given using the single-letter nucleotide code. In addition to the consensus sequence, sequences are shown representing at least 99%, 95% and 90% of the nucleotides present in the sequences analyzed.

[0374] FIG. 4: shows the histone stem-loop consensus sequence generated from vertebrate stem-loop sequences (as reported by Dávila López, M., & Samuelsson, T. (2008), RNA (New York, N.Y.), 14(1), 1-10. doi:10.1261/rna.782308). 1333 histone stem-loop sequences from vertebrates were aligned and the quantity of the occurring nucleotides is indicated for every position in the stem-loop sequence. The generated consensus sequence representing all nucleotides present in the sequences analyzed is given using the single-letter nucleotide code. In addition to the consensus sequence, sequences are shown representing at least 99%, 95% and 90% of the nucleotides present in the sequences analyzed.

[0375] FIG. 5: shows the histone stem-loop consensus sequence generated from human (Homo sapiens) stem-loop sequences (as reported by Dávila López, M., & Samuelsson, T. (2008), RNA (New York, N.Y.), 14(1), 1-10. doi:10.1261/rna.782308). 84 histone stem-loop sequences from humans were aligned and the quantity of the occurring nucleotides is indicated for every position in the stem-loop sequence. The generated consensus sequence representing all nucleotides present in the sequences analyzed is given using the single-letter nucleotide code. In addition to the consensus sequence, sequences are shown representing at least 99%, 95% and 90% of the nucleotides present in the sequences analyzed.

[0376] FIG. 6 shows the nucleotide sequence of a Photinus pyralis luciferase encoding nucleic acid molecule PpLuc(GC)-ag-A64. This artificial construct does not comprise a 5′UTR element or a histone stem loop. The coding region for PpLuc(GC) is depicted in italics. The sequence depicted in FIG. 6 corresponds to SEQ ID No. 1364.

[0377] FIG. 7 shows the nucleotide sequence of RPL32-PpLuc(GC)-ag-A64-C30-histoneSL. The 5′UTR of human ribosomal protein Large 32 lacking the 5′ terminal oligopyrimidine tract was inserted 5′ of the ORF. A histoneSL was appended 3′ of A64 poly(A). The coding region for PpLuc(GC) is depicted in italics. The 5′UTR element sequence and the histone stem-loop sequence are underlined. The sequence depicted in FIG. 7 corresponds to SEQ ID No. 1365.

[0378] FIG. 8 shows that the combination of the 5′UTR element derived from the 5′UTR of the TOP gene RPL32 and a histone stem-loop increases protein production from mRNA strongly. The effect of the combination of the 5′UTR element and the histone stem-loop on luciferase expression from mRNA was examined. To this end, different mRNAs were transfected into human dermal fibroblasts (HDF) by lipofection. Luciferase levels were measured at 24 hours after transfection. Luciferase was clearly expressed from mRNA having neither 5′UTR element nor histoneSL. Strikingly however, the combination of 5′UTR element and histoneSL strongly increased the luciferase level. The magnitude of the rise in luciferase level due to combining 5′UTR element and histoneSL in the same mRNA indicates that they are acting synergistically. Data are graphed as mean RLU±SD (relative light units±standard deviation) for duplicate transfections. RLU are summarized in Example 5.1.

[0379] FIG. 9 shows the nucleotide sequence of PpLuc(GC)-ag-A64-histoneSL. A histoneSL was appended 3′ of A64 poly(A). The coding region for PpLuc(GC) is depicted in italics. The histone stem-loop sequence is underlined. The sequence depicted in FIG. 9 corresponds to SEQ ID No. 1464.

[0380] FIG. 10 shows the nucleotide sequence of rpl32-PpLuc(GC)-ag-A64. The 5′UTR of human ribosomal protein Large 32 lacking the 5′ terminal oligopyrimidine tract was inserted 5′ of the ORF. The coding region for PpLuc(GC) is depicted in italics. The 5′UTR element sequence is underlined. The sequence depicted in FIG. 10 corresponds to SEQ ID No. 1463.

[0381] FIG. 11 shows the nucleotide sequence of rpl32-PpLuc(GC)-ag-A64-histoneSL. The 5′UTR of human ribosomal protein Large 32 lacking the 5′ terminal oligopyrimidine tract was inserted 5′ of the ORF. A histoneSL was appended 3′ of A64 poly(A). The coding region for PpLuc(GC) is depicted in italics. The 5′UTR element sequence and the histone stem-loop sequence are underlined. The sequence depicted in FIG. 11 corresponds to SEQ ID No. 1480.

[0382] FIG. 12 is a graphical representation of the effect of the 5′UTR element derived from the 5′UTR of the TOP gene RPL32, the histone stem-loop, and the combination of the 5′UTR element and the histone stem-loop on luciferase expression from mRNA. A variety of mRNAs were transfected into human dermal fibroblasts (HDF) by lipofection. Luciferase levels were measured at 8, 24, and 48 hours after transfection. Both, either the histone stem-loop or the 5′UTR element increase luciferase levels compared to mRNA lacking both these elements. Strikingly, the combination of 5′UTR element and histone stem-loop further strongly increases the luciferase level, much above the level observed with either of the individual elements, thus acting synergistically. Data are graphed as mean RLU±SEM (relative light units±standard error) for triplicate transfections. RLU are summarized in Example 5.2.

[0383] FIG. 13 shows the nucleotide sequence of rpl32-PpLuc(GC)-albumin7-A64-C30-histoneSL. The albumin7 3′UTR element replaced the alphα-globin 3′UTR element in the construct shown in FIG. 7 (which contains the rpl32 5′UTR element). The 5′UTR element sequence is underlined. The sequence depicted in FIG. 13 corresponds to SEQ ID No. 1481.

[0384] FIG. 14 shows the nucleotide sequence of rpl35-PpLuc(GC)-albumin7-A64-C30-histoneSL. The 5′UTR of human ribosomal protein Large 35 lacking the 5′ terminal oligopyrimidine tract replaced the rpl32 5′UTR element in the construct shown in FIG. 13. The 5′UTR element sequence is underlined. The sequence depicted in FIG. 14 corresponds to SEQ ID No. 1436.

[0385] FIG. 15 shows the nucleotide sequence of rpl21-PpLuc(GC)-albumin7-A64-C30-histoneSL. The 5′UTR of human ribosomal protein Large 21 lacking the 5′ terminal oligopyrimidine tract replaced the rpl32 5′UTR element in the construct shown in FIG. 13. The 5′UTR element sequence is underlined. The sequence depicted in FIG. 15 corresponds to SEQ ID No. 1437.

[0386] FIG. 16 shows the nucleotide sequence of atp5al-PpLuc(GC)-albumin7-A64-C30-histoneSL. The 5′UTR of human ATP synthase, H+ transporting, mitochondrial F1 complex, alpha subunit 1 lacking the 5′ terminal oligopyrimidine tract replaced the rpl32 5′UTR element in the construct shown in FIG. 13. The 5′UTR element sequence is underlined. The sequence depicted in FIG. 16 corresponds to SEQ ID No. 1438.

[0387] FIG. 17 shows the nucleotide sequence of HSD17B4-PpLuc(GC)-albumin7-A64-C30-histoneSL. The 5′UTR of human hydroxysteroid (17-beta) dehydrogenase 4 lacking the 5′ terminal oligopyrimidine tract replaced the rpl32 5′UTR element in the construct shown in FIG. 13. The 5′UTR element sequence is underlined. The sequence depicted in FIG. 17 corresponds to SEQ ID No. 1439.

[0388] FIG. 18 shows the nucleotide sequence of AIG1-PpLuc(GC)-albumin7-A64-C30-histoneSL. The 5′UTR of human androgen-induced 1 lacking the 5′ terminal oligopyrimidine tract replaced the rpl32 5′UTR element in the construct shown in FIG. 13. The 5′UTR element sequence is underlined. The sequence depicted in FIG. 18 corresponds to SEQ ID No. 1440.

[0389] FIG. 19 shows the nucleotide sequence of COX6C-PpLuc(GC)-albumin7-A64-C30-histoneSL. The 5′UTR of human cytochrome c oxidase subunit VIc lacking the 5′ terminal oligopyrimidine tract replaced the rpl32 5′UTR element in the construct shown in FIG. 13. The 5′UTR element sequence is underlined. The sequence depicted in FIG. 19 corresponds to SEQ ID No. 1441.

[0390] FIG. 20 shows the nucleotide sequence of ASAH1-PpLuc(GC)-albumin7-A64-C30-histoneSL. The 5′UTR of human N-acylsphingosine amidohydrolase (acid ceramidase) 1 lacking the 5′ terminal oligopyrimidine tract replaced the rpl32 5′UTR element in the construct shown in FIG. 13. The 5′UTR element sequence is underlined. The sequence depicted in FIG. 20 corresponds to SEQ ID No. 1442.

[0391] FIG. 21 is a graphical representation of the effect of the 5′UTR element derived from the TOP genes RPL32, RPL35, RPL21, ATP5A1, HSD17B4, AIG1, COX6C and ASAH1 on luciferase expression from mRNA. The mRNAs were transfected into human dermal fibroblasts (HDF) by lipofection. Luciferase levels were measured at 24, 48, and 72 hours after transfection. The 5′UTR elements strongly increase luciferase levels compared to mRNA lacking a 5′UTR element. Data are graphed as mean RLU±SEM (relative light units±standard error) for triplicate transfections. RLU are summarized in Example 5.3.

[0392] FIG. 22 shows the nucleotide sequence of rpl35-PpLuc(GC)-ag-A64. The 5′UTR of human ribosomal protein Large 35 lacking the 5′ terminal oligopyrimidine tract replaced the rpl32 5′UTR element in the construct shown in FIG. 10. The coding region for PpLuc(GC) is depicted in italics. The 5′UTR element sequence is underlined. The sequence depicted in FIG. 22 corresponds to SEQ ID No. 1466.

[0393] FIG. 23 shows the nucleotide sequence of rpl21-PpLuc(GC)-ag-A64. The 5′UTR of human ribosomal protein Large 21 lacking the 5′ terminal oligopyrimidine tract replaced the rpl32 5′UTR element in the construct shown in FIG. 10. The coding region for PpLuc(GC) is depicted in italics. The 5′UTR element sequence is underlined. The sequence depicted in FIG. 23 corresponds to SEQ ID No. 1467.

[0394] FIG. 24 shows the nucleotide sequence of atp5al-PpLuc(GC)-ag-A64. The 5′UTR of human ATP synthase, H+ transporting, mitochondrial F1 complex, alpha subunit 1 lacking the 5′ terminal oligopyrimidine tract replaced the rpl32 5′UTR element in the construct shown in FIG. 10. The coding region for PpLuc(GC) is depicted in italics. The 5′UTR element sequence is underlined. The sequence depicted in FIG. 24 corresponds to SEQ ID No. 1468.

[0395] FIG. 25 shows the nucleotide sequence of HSD17B4-PpLuc(GC)-ag-A64. The 5′UTR of human hydroxysteroid (17-beta) dehydrogenase 4 lacking the 5′ terminal oligopyrimidine tract replaced the rpl32 5′UTR element in the construct shown in FIG. 10. The coding region for PpLuc(GC) is depicted in italics. The 5′UTR element sequence is underlined. The sequence depicted in FIG. 25 corresponds to SEQ ID No. 1469.

[0396] FIG. 26 shows the nucleotide sequence of AIG1-PpLuc(GC)-ag-A64. The 5′UTR of human androgen-induced 1 lacking the 5′ terminal oligopyrimidine tract replaced the rpl32 5′UTR element in the construct shown in FIG. 10. The coding region for PpLuc(GC) is depicted in italics. The 5′UTR element sequence is underlined. The sequence depicted in FIG. 26 corresponds to SEQ ID No. 1470.

[0397] FIG. 27 shows the nucleotide sequence of COX6C-PpLuc(GC)-ag-A64. The 5′UTR of human cytochrome c oxidase subunit VIc lacking the 5′ terminal oligopyrimidine tract replaced the rpl32 5′UTR element in the construct shown in FIG. 10. The coding region for PpLuc(GC) is depicted in italics. The 5′UTR element sequence is underlined. The sequence depicted in FIG. 27 corresponds to SEQ ID No. 1471.

[0398] FIG. 28 shows the nucleotide sequence of ASAH1-PpLuc(GC)-ag-A64. The 5′UTR of human N-acylsphingosine amidohydrolase (acid ceramidase) 1 lacking the 5′ terminal oligopyrimidine tract replaced the rpl32 5′UTR element in the construct shown in FIG. 10. The coding region for PpLuc(GC) is depicted in italics. The 5′UTR element sequence is underlined. The sequence depicted in FIG. 28 corresponds to SEQ ID No. 1472.

[0399] FIG. 29 shows the nucleotide sequence of rpls5-PpLuc(GC)-ag-A64-histoneSL. The 5′UTR of human ribosomal protein Large 35 lacking the 5′ terminal oligopyrimidine tract replaced the rpl32 5′UTR element in the construct shown in FIG. 11. The coding region for PpLuc(GC) is depicted in italics. The 5′UTR element sequence and the histone stem-loop sequence are underlined. The sequence depicted in FIG. 29 corresponds to SEQ ID No. 1473.

[0400] FIG. 30 shows the nucleotide sequence of rpl21-PpLuc(GC)-ag-A64-histoneSL. The 5′UTR of human ribosomal protein Large 21 lacking the 5′ terminal oligopyrimidine tract replaced the rpl32 5′UTR element in the construct shown in FIG. 11. The coding region for PpLuc(GC) is depicted in italics. The 5′UTR element sequence and the histone stem-loop sequence are underlined. The sequence depicted in FIG. 30 corresponds to SEQ ID No. 1474.

[0401] FIG. 31 shows the nucleotide sequence of atp5al-PpLuc(GC)-ag-A64-histoneSL. The 5′UTR of human ATP synthase, H+ transporting, mitochondrial F1 complex, alpha subunit 1 lacking the 5′ terminal oligopyrimidine tract replaced the rpl32 5′UTR element in the construct shown in FIG. 11. The coding region for PpLuc(GC) is depicted in italics. The 5′UTR element sequence and the histone stem-loop sequence are underlined. The sequence depicted in FIG. 31 corresponds to SEQ ID No. 1475.

[0402] FIG. 32 shows the nucleotide sequence of HSD17B4-PpLuc(GC)-ag-A64-histoneSL. The 5′UTR of human hydroxysteroid (17-beta) dehydrogenase 4 lacking the 5′ terminal oligopyrimidine tract replaced the rpl32 5′UTR element in the construct shown in FIG. 11. The coding region for PpLuc(GC) is depicted in italics. The 5′UTR element sequence and the histone stem-loop sequence are underlined. The sequence depicted in FIG. 32 corresponds to SEQ ID No. 1476.

[0403] FIG. 33 shows the nucleotide sequence of AIG1-PpLuc(GC)-ag-A64-histoneSL. The 5′UTR of human androgen-induced 1 lacking the 5′ terminal oligopyrimidine tract replaced the rpl32 5′UTR element in the construct shown in FIG. 11. The coding region for PpLuc(GC) is depicted in italics. The 5′UTR element sequence and the histone stem-loop sequence are underlined. The sequence depicted in FIG. 33 corresponds to SEQ ID No. 1477.

[0404] FIG. 34 shows the nucleotide sequence of COX6C-PpLuc(GC)-ag-A64-histoneSL. The 5′UTR of human cytochrome c oxidase subunit VIc lacking the 5′ terminal oligopyrimidine tract replaced the rpl32 5′UTR element in the construct shown in FIG. 11. The coding region for PpLuc(GC) is depicted in italics. The 5′UTR element sequence and the histone stem-loop sequence are underlined. The sequence depicted in FIG. 34 corresponds to SEQ ID No. 1478.

[0405] FIG. 35 shows the nucleotide sequence of ASAH1-PpLuc(GC)-ag-A64-histoneSL. The 5′UTR of human N-acylsphingosine amidohydrolase (acid ceramidase) 1 lacking the 5′ terminal oligopyrimidine tract replaced the rpl32 5′UTR element in the construct shown in FIG. 11. The coding region for PpLuc(GC) is depicted in italics. The 5′UTR element sequence and the histone stem-loop sequence are underlined. The sequence depicted in FIG. 35 corresponds to SEQ ID No. 1479.

[0406] FIG. 36 is a graphical representation of the effect of 5′UTR elements derived from 5′UTRs of the TOP genes RPL35, RPL21, ATP5A1, HSD17B4, AIG1, COX6C and ASAH1, the histone stem-loop, and the combination of 5′UTR elements and histone stem-loop on luciferase expression from mRNA. The different mRNAs were transfected into human dermal fibroblasts (HDF) by lipofection. Luciferase levels were measured at 8, 24, and 48 hours after transfection. Both, either the histone stem-loop or the 5′UTR elements increase luciferase levels compared to mRNA lacking both these elements. Strikingly, the combination of 5′UTR elements and histone stem-loop further strongly increases the luciferase level, much above the level observed with either of the individual elements, thus acting synergistically. Data are graphed as mean RLU±SEM (relative light units±standard error) for triplicate transfections. The synergy between 5′UTR elements and histone stem-loop is summarized in example 5.4.

[0407] FIG. 37 shows the nucleotide sequence of mrpl21-PpLuc(GC)-albumin7-A64-C30-histoneSL. The 5′UTR of murine ribosomal protein Large 21 lacking the 5′ terminal oligopyrimidine tract replaced the rpl32 5′UTR element in the construct shown in FIG. 13. The 5′UTR element sequence is underlined. The sequence depicted in FIG. 36 corresponds to SEQ ID No. 1443.

[0408] FIG. 38 shows the nucleotide sequence of mrpl35A-PpLuc(GC)-albumin7-A64-C30-histoneSL. The 5′UTR of murine ribosomal protein Large 35A lacking the 5′ terminal oligopyrimidine tract replaced the rpl32 5′UTR element in the construct shown in FIG. 13. The 5′UTR element sequence is underlined. The sequence depicted in FIG. 37 corresponds to SEQ ID No. 1444.

[0409] FIG. 39 is a graphical representation of the effect of the 5′UTR elements derived from 5′UTRs of mouse TOP genes on luciferase expression from mRNA. mRNAs containing either a mouse or a human 5′UTR element were transfected into human dermal fibroblasts (HDF) by lipofection. Luciferase levels were measured at 24, 48, and 72 hours after transfection. Mouse 5′UTR elements strongly increase luciferase levels compared to mRNA lacking a 5′UTR element, similarly as the human 5′UTR element. Data are graphed as mean RLU±SEM (relative light units±standard error) for triplicate transfections. RLU are summarized in Example 5.5.

[0410] SEQ ID No. 1-1363. 1435, and 1461-1462 sequences comprising 5′UTRs of TOP genes
[0411] SEQ ID No. 1364 PpLuc(GC)-ag-A64 (FIG. 6)
[0412] SEQ ID No. 1365 RPL32-PpLuc(GC)-ag-A64-C30-histoneSL (FIG. 7)
[0413] SEQ ID No. 1366 fragment of the 5′UTR of human ribosomal protein Large 32
[0414] SEQ ID No. 1367 fragment of the 5′UTR of human ribosomal protein Large 32
[0415] SEQ ID No. 1368 5′UTR of human ribosomal protein Large 32 lacking the 5′ terminal oligopyrimidine tract
[0416] SEQ ID No. 1369 Human albumin 3′UTR
[0417] SEQ ID No. 1370 3′UTR of Homo sapiens hemoglobin, alpha 1 (HBA1)
[0418] SEQ ID No. 1371 3′UTR of Homo sapiens hemoglobin, alpha 2 (HBA2)
[0419] SEQ ID No. 1372 3′UTR of Homo sapiens hemoglobin, beta (HBB)
[0420] SEQ ID No. 1373 3′UTR of Homo sapiens tyrosine hydroxylase (TH)
[0421] SEQ ID No. 1374 3′UTR of Homo sapiens arachidonate 15-lipoxygenase (ALOX15)
[0422] SEQ ID No. 1375 3′UTR of Homo sapiens collagen, type I, alpha 1 (COL1A1)
[0423] SEQ ID No. 1376 albumin7 3′UTR
[0424] SEQ ID No. 1377 Human albumin 3′UTR+poly(A) sequence
[0425] SEQ ID No. 1378 Human albumin 3′UTR fragment 1
[0426] SEQ ID No. 1379 Human albumin 3′UTR fragment 2
[0427] SEQ ID No. 1380 Human albumin 3′UTR fragment 3
[0428] SEQ ID No. 1381 Human albumin 3′UTR fragment 4
[0429] SEQ ID No. 1382 Human albumin 3′UTR fragment 5
[0430] SEQ ID No. 1383 Human albumin 3′UTR fragment 6
[0431] SEQ ID No. 1384 Human albumin 3′UTR fragment 7
[0432] SEQ ID No. 1385 Human albumin 3′UTR fragment 8
[0433] SEQ ID No. 1386 Human albumin 3′UTR fragment 9
[0434] SEQ ID No. 1387 Human albumin 3′UTR fragment 10
[0435] SEQ ID No. 1388 Human albumin 3′UTR fragment 11
[0436] SEQ ID No. 1389 Human albumin 3′UTR fragment 12
[0437] SEQ ID No. 1390 Human albumin 3′UTR fragment 13
[0438] SEQ ID NO. 1391 Sequence according to formula (Ic)
[0439] SEQ ID NO. 1392 Sequence according to formula (IIc):
[0440] SEQ ID NO. 1393 Sequence according to formula (Id);
[0441] SEQ ID NO. 1394 Sequence according to formula (IId)
[0442] SEQ ID NO. 1395 Sequence according to formula (Ie)
[0443] SEQ ID NO. 1396 Sequence according to formula (IIe)
[0444] SEQ ID NO. 1397 Sequence according to formula (If)
[0445] SEQ ID NO. 1398 Sequence according to formula (IIf)
[0446] SEQ ID NO. 1399 Sequence according to formula (Ig)
[0447] SEQ ID NO. 1400 Sequence according to formula (IIg)
[0448] SEQ ID NO. 1401 Sequence according to formula (Ih)
[0449] SEQ ID NO. 1402 Sequence according to formula (IIh)
[0450] SEQ ID NO. 1403 Sequence according to formula (Ic)
[0451] SEQ ID NO. 1404 Sequence according to formula (Ic)
[0452] SEQ ID NO. 1405 Sequence according to formula (Ic)
[0453] SEQ ID NO. 1406 Sequence according to formula (Ie)
[0454] SEQ ID NO. 1407 Sequence according to formula (Ie)
[0455] SEQ ID NO. 1408 Sequence according to formula (Ie)
[0456] SEQ ID NO. 1409 Sequence according to formula (If)
[0457] SEQ ID NO. 1410 Sequence according to formula (If)
[0458] SEQ ID NO. 1411 Sequence according to formula (If)
[0459] SEQ ID NO. 1412 Sequence according to formula (Ig)
[0460] SEQ ID NO. 1413 Sequence according to formula (Ig)
[0461] SEQ ID NO. 1414 Sequence according to formula (Ig)
[0462] SEQ ID NO. 1415 Sequence according to formula (Ih)
[0463] SEQ ID NO. 1416 Sequence according to formula (Ih)
[0464] SEQ ID NO. 1417 Sequence according to formula (Ih)
[0465] SEQ ID NO. 1418 Sequence according to formula (IIc)
[0466] SEQ ID NO. 1419 Sequence according to formula (IIc)
[0467] SEQ ID NO. 1420 Sequence according to formula (IIc)
[0468] SEQ ID NO. 1421 Sequence according to formula (IIe)
[0469] SEQ ID NO. 1422 Sequence according to formula (IIe)
[0470] SEQ ID NO. 1423 Sequence according to formula (IIe)
[0471] SEQ ID NO. 1424 Sequence according to formula (If)
[0472] SEQ ID NO. 1425 Sequence according to formula (If)
[0473] SEQ ID NO. 1426 Sequence according to formula (If)
[0474] SEQ ID NO. 1427 Sequence according to formula (IIg)
[0475] SEQ ID NO. 1428 Sequence according to formula (IIg)
[0476] SEQ ID NO. 1429 Sequence according to formula (IIg)
[0477] SEQ ID NO. 1430 Sequence according to formula (IIh)
[0478] SEQ ID NO. 1431 Sequence according to formula (IIh)
[0479] SEQ ID NO. 1432 Sequence according to formula (IIh)
[0480] SEQ ID NO. 1433 Example histone stem-loop sequence
[0481] SEQ ID NO. 1434 Center, α-complex-binding portion of the 3′UTR of an α-globin gene
[0482] SEQ ID NO. 1435 ATP synthase lipid-binding protein, mitochondrial (atp5g2)
[0483] SEQ ID NO. 1436 RPL35-PpLuc(GC)-albumin7-A64-C30-histoneSL (FIG. 14)
[0484] SEQ ID NO. 1437 RPL21-PpLuc(GC)-albumin7-A64-C30-histoneSL (FIG. 15)
[0485] SEQ ID NO. 1438 ATP5A1-PpLuc(GC)-albumin7-A64-C30-histoneSL (FIG. 16)
[0486] SEQ ID NO. 1439 HSD17B4-PpLuc(GC)-albumin7-A64-C30-histoneSL (FIG. 17)
[0487] SEQ ID NO. 1440 AIG1-PpLuc(GC)-albumin7-A64-C30-histoneSL (FIG. 18)
[0488] SEQ ID NO. 1441 COX6C-PpLuc(GC)-albumin7-A64-C30-histoneSL (FIG. 19)
[0489] SEQ ID NO. 1442 ASAH1-PpLuc(GC)-albumin7-A64-C30-histoneSL (FIG. 20)
[0490] SEQ ID NO. 1443 mRPL21-PpLuc(GC)-albumin7-A64-C30-histoneSL (FIG. 37)
[0491] SEQ ID NO. 1444 mRPL35A-PpLuc(GC)-albumin7-A64-C30-histoneSL (FIG. 38)
[0492] SEQ ID NO. 1445 RPL35-PpLuc(GC)-A64-C30-histoneSL
[0493] SEQ ID NO. 1446 RPL21-PpLuc(GC)-A64-C30-histoneSL
[0494] SEQ ID NO. 1447 ATPSA1-PpLuc(GC)-A64-C30-histoneSL
[0495] SEQ ID NO. 1448 HSD 17B4-PpLuc(GC)-A64-C30-histoneSL
[0496] SEQ ID NO. 1449 AIG1-PpLuc(GC)-A64-C30-histoneSL
[0497] SEQ ID NO. 1450 COX6C-PpLuc(GC)-A64-C30-histoneSL
[0498] SEQ ID NO. 1451 ASAH1-PpLuc(GC)-A64-C30-histoneSL
[0499] SEQ ID NO. 1452 5′UTR of human ribosomal protein Large 35 (RPL35) lacking the 5′ terminal oligopyrimidine tract
[0500] SEQ ID NO. 1453 5′UTR of human ribosomal protein Large 21 (RPL21) lacking the 5′ terminal oligopyrimidine tract
[0501] SEQ ID NO. 1454 5′UTR of human ATP synthase, H+ transporting, mitochondrial F1 complex, alpha subunit 1, cardiac muscle (ATP5A1) lacking the 5′ terminal oligopyrimidine tract
[0502] SEQ ID NO. 1455 5′UTR of human hydroxysteroid (17-beta) dehydrogenase 4 (HSD17B4) lacking the 5′ terminal oligopyrimidine tract
[0503] SEQ ID NO. 1456 5′UTR of human androgen-induced 1 (AIG1) lacking the 5′ terminal oligopyrimidine tract
[0504] SEQ ID NO. 1457 5′UTR of human cytochrome c oxidase subunit VIc (COX6C) lacking the 5′ terminal oligopyrimidine tract
[0505] SEQ ID NO. 1458 5′UTR of human N-acylsphingosine amidohydrolase (acid ceramidase) 1 (ASAH1) lacking the 5′ terminal oligopyrimidine tract
[0506] SEQ ID NO. 1459 5′UTR of mouse ribosomal protein Large 21 (mRPL21) lacking the 5′ terminal oligopyrimidine tract
[0507] SEQ ID NO. 1460 5′UTR of mouse ribosomal protein large 35A (mRPL35A) lacking the 5′ terminal oligopyrimidine tract
[0508] SEQ ID NO. 1461 Mouse ribosomal protein Large 21 (mRPL21)
[0509] SEQ ID NO. 1462 Mouse ribosomal protein large 35A (mRPL35A)
[0510] SEQ ID NO. 1463 RPL32-PpLuc(GC)-ag-A64 (FIG. 10)
[0511] SEQ ID NO. 1464 PpLuc(GC)-ag-A64-histoneSL (FIG. 9)
[0512] SEQ ID NO. 1465 PpLuc(GC)-albumin7-A64-C30-histoneSL
[0513] SEQ ID NO. 1466 RPL35-PpLuc(GC)-ag-A64 (FIG. 22)
[0514] SEQ ID NO. 1467 RPL21-PpLuc(GC)-ag-A64 (FIG. 23)
[0515] SEQ ID NO. 1468 atp5al-PpLuc(GC)-ag-A64 (FIG. 24)
[0516] SEQ ID NO. 1469 HSD17B4-PpLuc(GC)-ag-A64 (FIG. 25)
[0517] SEQ ID NO. 1470 AIG1-PpLuc(GC)-ag-A64 (FIG. 26)
[0518] SEQ ID NO. 1471 COX6C-PpLuc(GC)-ag-A64 (FIG. 27)
[0519] SEQ ID NO. 1472 ASAH 1-PpLuc(GC)-ag-A64 (FIG. 28)
[0520] SEQ ID NO. 1473 RPL35-PpLuc(GC)-ag-A64-histoneSL (FIG. 29)
[0521] SEQ ID NO. 1474 RPL21-PpLuc(GC)-ag-A64-histoneSL (FIG. 30)
[0522] SEQ ID NO. 1475 atp5al-PpLuc(GC)-ag-A64-histoneSL (FIG. 31)
[0523] SEQ ID NO. 1476 HSD17B4-PpLuc(GC)-ag-A64-histoneSL (FIG. 32)
[0524] SEQ ID NO. 1477 AIG1-PpLuc(GC)-ag-A64-histoneSL (FIG. 33)
[0525] SEQ ID NO. 1478 COX6C-PpLuc(GC)-ag-A64-histoneSL (FIG. 34)
[0526] SEQ ID NO. 1479 ASAH1-PpLuc(GC)-ag-A64-histoneSL (FIG. 35)
[0527] SEQ ID NO. 1480 RPL32-PpLuc(GC)-ag-A64-histoneSL (FIG. 11)
[0528] SEQ ID NO. 1481 RPL32-PpLuc(GC)-albumin7-A64-C30-histoneSL (FIG. 13)

### EXAMPLES

### 1. Preparation of DNA-templates

[0529] A vector for in vitro transcription was constructed containing a T7 promoter followed by a GC-enriched sequence coding for Photinus pyralis luciferase (PpLuc(GC)) and an A64 poly(A) sequence. The poly(A) sequence was followed by a restriction site used for linearization of the vector before in vitro transcription. mRNA obtained from this vector accordingly by in vitro transcription is designated as “PpLuc(GC)-A64”.

[0530] This vector was modified to include untranslated sequences 5′ or 3′ of the open reading frame. In summary, vectors comprising the following mRNA encoding sequences have been generated:
[0531] SEQ ID No. 1364 PpLuc(GC)-ag-A64 (FIG. 6)
[0532] SEQ ID No. 1365 RPL32-PpLuc(GC)-ag-A64-C30-histoneSL (FIG. 7);
[0533] SEQ ID NO. 1436 RPL35-PpLuc(GC)-albumin7-A64-C30-histoneSL (FIG. 14)
[0534] SEQ ID NO. 1437 RPL21-PpLuc(GC)-albumin7-A64-C30-histoneSL (FIG. 15)
[0535] SEQ ID NO. 1438 ATP5A1-PpLuc(GC)-albumin7-A64-C30-histoneSL (FIG. 16)
[0536] SEQ ID NO. 1439 HSD17B4-PpLuc(GC)-albumin7-A64-C30-histoneSL (FIG. 17)
[0537] SEQ ID NO. 1440 AIG1-PpLuc(GC)-albumin7-A64-C30-histoneSL (FIG. 18)
[0538] SEQ ID NO. 1441 COX6C-PpLuc(GC)-albumin7-A64-C30-histoneSL (FIG. 19)
[0539] SEQ ID NO. 1442 ASAH1-PpLuc(GC)-albumin7-A64-C30-histoneSL (FIG. 20)
[0540] SEQ ID NO. 1443 mRPL21-PpLuc(GC)-albumin7-A64-C30-histoneSL (FIG. 37)
[0541] SEQ ID NO. 1444 mRPL35A-PpLuc(GC)-albumin7-A64-C30-histoneSL (FIG. 38)
[0542] SEQ ID NO. 1445 RPL35-PpLuc(GC)-A64-C30-histoneSL
[0543] SEQ ID NO. 1446 RPL21-PpLuc(GC)-A64-C30-histoneSL
[0544] SEQ ID NO. 1447 ATP5A1-PpLuc(GC)-A64-C30-histoneSL
[0545] SEQ ID NO. 1448 HSD 17B4-PpLuc(GC)-A64-C30-histoneSL
[0546] SEQ ID NO. 1449 AIG1-PpLuc(GC)-A64-C30-histoneSL
[0547] SEQ ID NO. 1450 COX6C-PpLuc(GC)-A64-C30-histoneSL
[0548] SEQ ID NO. 1451 ASAH1-PpLuc(GC)-A64-C30-histoneSL
[0549] SEQ ID NO. 1463 RPL32-PpLuc(GC)-ag-A64 (FIG. 10)
[0550] SEQ ID NO. 1464 PpLuc(GC)-ag-A64-histoneSL (FIG. 9)
[0551] SEQ ID NO. 1465 PpLuc(GC)-albumin7-A64-C30-histoneSL
[0552] SEQ ID NO. 1466 RPL35-PpLuc(GC)-ag-A64 (FIG. 22)
[0553] SEQ ID NO. 1467 RPL21-PpLuc(GC)-ag-A64 (FIG. 23)
[0554] SEQ ID NO. 1468 atp5al-PpLuc(GC)-ag-A64 (FIG. 24)
[0555] SEQ ID NO. 1469 HSD17B4-PpLuc(GC)-ag-A64 (FIG. 25)
[0556] SEQ ID NO. 1470 AIG1-PpLuc(GC)-ag-A64 (FIG. 26)
[0557] SEQ ID NO. 1471 COX6C-PpLuc(GC)-ag-A64 (FIG. 27)
[0558] SEQ ID NO. 1472 ASAH 1-PpLuc(GC)-ag-A64 (FIG. 28)
[0559] SEQ ID NO. 1473 RPL35-PpLuc(GC)-ag-A64-histoneSL (FIG. 29)
[0560] SEQ ID NO. 1474 RPL21-PpLuc(GC)-ag-A64-histoneSL (FIG. 30)
[0561] SEQ ID NO. 1475 atp5al-PpLuc(GC)-ag-A64-histoneSL (FIG. 31)
[0562] SEQ ID NO. 1476 HSD17B4-PpLuc(GC)-ag-A64-histoneSL (FIG. 32)
[0563] SEQ ID NO. 1477 AIG1-PpLuc(GC)-ag-A64-histoneSL (FIG. 33)
[0564] SEQ ID NO. 1478 COX6C-PpLuc(GC)-ag-A64-histoneSL (FIG. 34)
[0565] SEQ ID NO. 1479 ASAH1-PpLuc(GC)-ag-A64-histoneSL (FIG. 35)
[0566] SEQ ID NO. 1480 RPL32-PpLuc(GC)-ag-A64-histoneSL (FIG. 11)
[0567] SEQ ID NO. 1481 RPL32-PpLuc(GC)-albumin7-A64-C30-histoneSL (FIG. 13)
   2. In vitro transcription

[0568] The DNA-template according to Example 1 was linearized and transcribed in vitro using T7-Polymerase. The DNA-template was then digested by DNase-treatment. mRNA transcripts contained a 5′-CAP structure obtained by adding an excess of N7-Methyl-Guanosine-5′-Triphosphate-5′-Guanosine to the transcription reaction. mRNA thus obtained was purified and resuspended in water.

3. Luciferase expression by mRNA lipofection

[0569] Human dermal fibroblasts (HDF) were seeded in 24 well plates at a density of 5×10⁴ cells per well. The following day, cells were washed in opti-MEM and then transfected with 50 ng per well of Lipofectamine2000-complexed PpLuc-encoding mRNA in opti-MEM. As a control, mRNA not coding for PpLuc was lipofected separately. mRNA coding for Renilla renzformis luciferase (RrLuc) was transfected together with PpLuc mRNA to control for transfection efficiency (20 ng of RrLuc mRNA per well). 90 minutes after start of transfection, opti-MEM was exchanged for medium. 24, 48, 72 hours after transfection, medium was aspirated and cells were lysed in 200 μl of lysis buffer (25 mM Tris, pH 7.5 (HCl), 2 mM EDTA, 10% glycerol, 1% Triton X-100, 2 mM DTT, 1 mM PMSF). Lysates were stored at −20° C. until luciferase activity was measured.

[0570] Alternatively, HDF were seeded in 96 well plates one to three days before transfection at a density of 10⁴ cells per well. Immediately before lipofection, cells were washed in opti-MEM. Cells were lipofected with 25 ng of PpLuc-encoding mRNA per well complexed with Lipofectamine2000. In some experiments, mRNA coding for Renilla renzformis luciferase (RrLuc) was transfected together with PpLuc mRNA to control for transfection efficiency (2.5 ng of RrLuc mRNA per well). 90 minutes after start of transfection, opti-MEM was exchanged for medium. At various time points post transfection, medium was aspirated and cells were lysed in 100 1d of lysis buffer (Passive Lysis Buffer, Promega). Lysates were stored at −80° C. until luciferase activity was measured.

4. Luciferase measurement

[0571] Luciferase activity was measured as relative light units (RLU) in a BioTek SynergyHT plate reader. PpLuc activity was measured at 15 seconds measuring time using 50 μl of lysate and 200 μl of luciferin buffer (75 μM luciferin, 25 mM Glycylglycin, pH 7.8 (NaOH), 15 mM MgSO4, 2 mM ATP). RrLuc activity was measured at 15 seconds measuring time using 50 μl of lysate and 200 μl of coelenterazin buffer (40 μM coelenterazin in phosphate buffered saline adjusted to 500 mM NaCl).

[0572] Alternatively, luciferase activity was measured as relative light units (RLU) in a Hidex Chame-leon plate reader. PpLuc activity was measured at 2 seconds measuring time using 20 μl of lysate and 50 μl of luciferin buffer (Beetle-Juice, PJK GmbH). RrLuc activity was measured at 2 seconds measuring time using 20 μl of lysate and 50 μl of coelenterazin buffer (Renilla-Juice, PJK GmbH).

### Results

5.1 the Combination of 5′UTR Elements Derived from 5′UTRs of TOP Genes and Histone Stem-Loop Increases Protein Expression Strongly.

[0573] To investigate the effect of the combination of a 5′UTR element derived from a 5′UTR of a TOP gene and a histone stem-loop (histoneSL) on protein expression from mRNA, mRNAs with different UTRs were synthesized: mRNAs either lacked both 5′UTR element and histoneSL, or contained both 5′UTR element and histoneSL. Luciferase-encoding mRNAs or control mRNA were transfected into human dermal fibroblasts (HDF). Luciferase levels were measured at 24 hours after transfection (see following Table 1 and FIG. 8).

TABLE 1

| mRNA | RLU at 24 hours |
|---|---|
| control RNA | 588 |
| PpLuc(GC) - ag - A64 | 12246 |
| RPL32 - PpLuc(GC) - ag - A64 - C30 - histoneSL | 319840 |

[0574] Luciferase was clearly expressed from mRNA having neither 5′UTR element nor histoneSL. Strikingly however, the combination of 5′UTR element and histoneSL strongly increased the luciferase level. The magnitude of the rise in luciferase level due to combining 5′UTR element and histoneSL in the same mRNA indicates that they are acting synergistically.

5.2 the Combination of 5′UTR Elements Derived from 5′UTRs of TOP Genes and Histone Stem-Loop Increases Protein Expression from mRNA in a Synergistic Manner.

[0575] To investigate the effect of the combination of a 5′UTR element derived from a 5′UTR of a TOP gene and histone stem-loop on protein expression from mRNA, mRNAs with different UTRs were synthesized: mRNAs either lacked both 5′UTR element and histone stem-loop, or contained either a 5′UTR element or a histone stem-loop, or both 5′UTR element and histone stem-loop. Luciferase-encoding mRNAs were transfected into human dermal fibroblasts (HDF). Luciferase levels were measured at 8, 24, and 48 hours after transfection (see following Table 2 and FIG. 12).

TABLE 2

| | RLU at 8 | RLU at 24 | RLU at 48 |
|---|---|---|---|
| mRNA | hours | hours | hours |
| PpLuc(GC)-ag-A64 | 13110 | 25861 | 14362 |
| PpLuc(GC)-ag-A64-histoneSL | 88640 | 97013 | 57026 |
| rpl32-PpLuc(GC)-ag-A64 | 155654 | 212245 | 102528 |
| rpl32-PpLuc(GC)-ag-A64-histoneSL | 301384 | 425825 | 161974 |

[0576] Luciferase was clearly expressed from mRNA having neither 5′UTR element nor histone stem-loop. Both, either the histone stem-loop or the 5′UTR element increased luciferase levels compared to mRNA lacking both these elements. Strikingly however, the combination of 5′UTR element and histone stem-loop further strongly increased the luciferase level, much above the level observed with either of the individual elements. The magnitude of the rise in luciferase level due to combining 5′UTR element and histone stem-loop in the same mRNA demonstrates that they are acting synergistically.

[0577] The synergy between 5′UTR element and histone stem-loop was quantified by dividing the signal from mRNA combining both elements by the sum of the signal from mRNA lacking both elements plus the rise in signal effected by the 5′UTR element plus the rise in signal effected by the histone stem-loop. This calculation was performed for the three time points individually and for total protein expressed from 0 to 48 hours calculated from the area under the curve (AUC) (see following Table 3).

TABLE 3

| | | | | | |
|---|---|---|---|---|---|
| | | | | RLU predicted | |
| rpl32 | histoneSL | RLU | Δ RLU | (additive) | synergy |

8 h

| | | | | | |
|---|---|---|---|---|---|
| − | − | 13110 | | | |
| − | + | 88640 | 75530 | | |
| + | − | 155654 | 142544 | | |
| + | + | 301384 | | 231184 | 1.30 |

24 h

| | | | | | |
|---|---|---|---|---|---|
| − | − | 25861 | | | |
| − | + | 97013 | 71152 | | |
| + | − | 212245 | 186384 | | |
| + | + | 425825 | | 283397 | 1.50 |

48 h

| | | | | | |
|---|---|---|---|---|---|
| − | − | 14362 | | | |
| − | + | 57026 | 42664 | | |
| + | − | 102528 | 88166 | | |
| + | + | 161974 | | 145192 | 1.12 |

AUC 0-48 hours

| | | | | | |
|---|---|---|---|---|---|
| − | − | 846881 | | | |
| − | + | 3688000 | 2841119 | | |
| + | − | 7343000 | 6496119 | | |
| + | + | 14080000 | | 10184119 | 1.38 |

[0578] The synergy thus calculated specifies how much higher the luciferase level from mRNA combining 5′UTR element and histone stem-loop is than would be expected if the effects of 5′UTR element and histone stem-loop were purely additive. This result confirms that the combination of 5′UTR element and histone stem-loop effects a markedly synergistic increase in protein expression.

5.3 5′UTR Elements Derived from 5′UTRs of TOP Genes Increase Protein Expression from mRNA.

[0579] To investigate the effect of 5′UTR elements derived from 5′UTRs of TOP genes on protein expression from mRNA, mRNAs with one of different 5′UTR elements were synthesized. In addition, mRNAs contained the albumin7 3′UTR element. Luciferase-encoding mRNAs were transfected into human dermal fibroblasts (HDF). Luciferase levels were measured at 24, 48, and 72 hours after transfection (see following Table 4 and FIG. 21).

TABLE 4

| 5′UTR | RLU at 24 hours | RLU at 48 hours | RLU at 72 hours |
|---|---|---|---|
| none | 114277 | 121852 | 68235 |
| rpl32 | 332236 | 286792 | 114148 |
| rpl35 | 495917 | 234070 | 96993 |
| rpl21 | 563314 | 352241 | 156605 |
| atp5a1 | 1000253 | 538287 | 187159 |
| HSD17B4 | 1179847 | 636877 | 299337 |
| AIG1 | 620315 | 446621 | 167846 |
| COX6C | 592190 | 806065 | 173743 |
| ASAH1 | 820413 | 529901 | 198429 |

[0580] Luciferase was clearly expressed from mRNA lacking a 5′UTR element. Strikingly however, all 5′UTR elements strongly increased the luciferase level.

5.4 the Combination of 5′UTR Elements Derived from 5′UTRs of TOP Genes and Histone Stem-Loop Increases Protein Expression from mRNA in a Synergistic Manner.

[0581] To investigate the effect of the combination of 5′UTR elements derived from the 5′UTRs of TOP genes and histone stem-loop on protein expression from mRNA, mRNAs with different UTRs were synthesized: mRNAs either lacked both 5′UTR element and histone stem-loop, or contained a histone stem-loop, or contained one of different 5′UTR elements derived from 5′UTRs of TOP genes, or contained both one of different 5′UTR elements and a histone stem-loop. In addition, mRNAs contained the alphα-globin 3′UTR element. Luciferase-encoding mRNAs were transfected into human dermal fibroblasts (HDF). Luciferase levels were measured at 8, 24, and 48 hours after transfection (see FIG. 36). Luciferase was clearly expressed from mRNA having neither 5′UTR element nor histone stem-loop. The histone stem-loop increased the luciferase level. All 5′UTR elements also increased the luciferase level. Strikingly however, the combinations of 5′UTR element and histone stem-loop further strongly increased the luciferase level, much above the level observed with either of the individual elements. The magnitude of the rise in luciferase level due to combining 5′UTR element and histone stem-loop in the same mRNA demonstrates that they are acting synergistically.

[0582] The synergy between 5′UTR element and histone stem-loop was quantified by dividing the signal from mRNA combining both elements by the sum of the signal from mRNA lacking both elements plus the rise in signal effected by the 5′UTR element plus the rise in signal effected by the histone stem-loop. This calculation was performed for total protein expressed from 0 to 48 hours calculated from the area under the curve (AUC) (see following Table 5).

TABLE 5

| TOP 5′UTR | Synergy with histone stem-loop |
|---|---|
| 35L | 2.50 |
| 21L | 3.25 |
| atp5a1 | 3.00 |
| HSD17B4 | 3.55 |
| AIG1 | 1.52 |
| COX6C | 3.19 |

[0583] The synergy thus calculated specifies how much higher the luciferase level from mRNA combining 5′UTR element and histone stem-loop is than would be expected if the effects of 5′UTR element and histone stem-loop were purely additive. The luciferase level from mRNA combining 5′UTR element and histone stem-loop was up to more than three times higher than if their effects were purely additive. This result confirms that the combination of 5′UTR element and histone stem-loop effects a markedly synergistic increase in protein expression.

5.5 5′UTR Elements Derived from 6′UTRs of Mouse TOP Genes Increase Protein Expression from mRNA.

[0584] To investigate the effect of TOP 5′UTR elements derived from 5′UTRs of mouse TOP genes on protein expression from mRNA, mRNAs with two different mouse 5′UTR elements were synthesized. In addition, mRNAs contained the albumin7 3′UTR element. Luciferase-encoding mRNAs were transfected into human dermal fibroblasts (HDF). For comparison, mRNA containing the human rpl32 5′UTR element was transfected. Luciferase levels were measured at 24, 48, and 72 hours after transfection (see following Table 6 and FIG. 39).

TABLE 6

| 5′UTR | RLU at 24 hours | RLU at 48 hours | RLU at 72 hours |
|---|---|---|---|
| none | 114277 | 121852 | 68235 |
| rpl32 | 332236 | 286792 | 114148 |
| mrpl21 | 798233 | 351894 | 139249 |
| mrpl35A | 838609 | 466236 | 174949 |

[0585] Luciferase was clearly expressed from mRNA lacking a 5′UTR element. Both mouse 5′UTR elements strongly increased the luciferase level, similarly as the human 5′UTR element.

1. An artificial nucleic acid molecule comprising:
a. at least one 5′-untranslated region element (5′UTR element) which comprises or consists of a nucleic acid sequence which is derived from the 5′UTR of a TOP gene or which is derived from a variant of the 5′UTR of a TOP gene; and
b. at least one open reading frame (ORF).

2. The artificial nucleic acid molecule according to claim 1, further comprising:
c. at least one histone stem-loop.

3. The artificial nucleic acid molecule according to claim 1 or 2, wherein the 5′UTR element and the open reading frame are heterologous.

4. The artificial nucleic acid molecule according to any one of claims 1-3, wherein the 5′UTR element is suitable for increasing protein production from the artificial nucleic acid molecule.

5. The artificial nucleic acid molecule according to any one of claims 2-4, wherein the 5′UTR element and the histone stem-loop act together, preferably at least additively, to increase protein production from the artificial nucleic acid molecule.

6. The artificial nucleic acid molecule according to any one of claims 1-5, wherein the 5′UTR element does not comprise a TOP-motif, preferably wherein the nucleic acid sequence which is derived from a 5′UTR of a TOP gene, preferably the 5′UTR element, starts at its 5′-end with a nucleotide located at position 1, 2, 3, 4, 5, 6, 7, 8, 9 or 10 downstream of the polypyrimidine tract.

7. The artificial nucleic acid molecule according to any one of claims 1-6, wherein the nucleic acid sequence which is derived from a 5′UTR of a TOP gene, preferably the 5′UTR element terminates at its 3′-end with a nucleotide located at position 1, 2, 3, 4, 5, 6, 7, 8, 9 or 10 upstream of the start codon of the gene it is derived from.

8. The artificial nucleic acid molecule according to any one of claims 1-7, wherein the 5′UTR element does not comprise a start codon or an open reading frame.

9. The artificial nucleic acid molecule according to any one of claims 1-8, wherein the nucleic acid sequence which is derived from the 5′UTR of a TOP gene is derived from the 5′UTR of a eukaryotic TOP gene or from a variant thereof, preferably from the 5′UTR of a plant or animal TOP gene or from a variant thereof, more preferably from the 5′UTR of a chordate TOP gene or from a variant thereof, even more preferably from the 5′UTR of a vertebrate TOP gene or from a variant thereof, most preferably from the 5′UTR of a mammalian TOP gene, such as a human TOP gene, or from a variant thereof.

10. The artificial nucleic acid molecule according to any one of claims 2-9, wherein the at least one histone stem-loop is selected from following formulae (I) or (II):
formula (I) (stem-loop sequence without stem bordering elements): [chemical structure]
formula (II) (stem-loop sequence with stem bordering elements): [chemical structure]
wherein:
stem1 or stem2 bordering elements N₁₋₆ is a consecutive sequence of 1 to 6, preferably of 2 to 6, more preferably of 2 to 5, even more preferably of 3 to 5, most preferably of 4 to 5 or 5 N, wherein each N is independently from another selected from a nucleotide selected from A, U, T, G and C, or a nucleotide analogue thereof;
stem1 [N₀₋₂GN₃₋₅] is reverse complementary or partially reverse complementary with element stem2, and is a consecutive sequence between of 5 to 7 nucleotides;
wherein N₀₋₂ is a consecutive sequence of 0 to 2, preferably of 0 to 1, more preferably of 1 N, wherein each N is independently from another selected from a nucleotide selected from A, U, T, G and C or a nucleotide analogue thereof;
wherein N₃₋₅ is a consecutive sequence of 3 to 5, preferably of 4 to 5, more preferably of 4 N, wherein each N is independently from another selected from a nucleotide selected from A, U, T, G and C or a nucleotide analogue thereof, and
wherein G is guanosine or an analogue thereof, and may be optionally replaced by a cytidine or an analogue thereof, provided that its complementary nucleotide cytidine in stem2 is replaced by guanosine;
loop sequence [N₀₋₄(U/T)N₀₋₄] is located between elements stem1 and stem2, and is a consecutive sequence of 3 to 5 nucleotides, more preferably of 4 nucleotides;
wherein each N₀₋₄ is independent from another a consecutive sequence of 0 to 4, preferably of 1 to 3, more preferably of 1 to 2 N, wherein each N is independently from another selected from a nucleotide selected from A, U, T, G and C or a nucleotide analogue thereof; and
wherein U/T represents uridine, or optionally thymidine;
stem2 [N₃₋₅CN₀₋₂] is reverse complementary or partially reverse complementary with element stem1, and is a consecutive sequence between of 5 to 7 nucleotides;
wherein N₃₋₅ is a consecutive sequence of 3 to 5, preferably of 4 to 5, more preferably of 4 N, wherein each N is independently from another selected from a nucleotide selected from A, U, T, G and C or a nucleotide analogue thereof;
wherein N₀₋₂ is a consecutive sequence of 0 to 2, preferably of 0 to 1, more preferably of 1 N, wherein each N is independently from another selected from a nucleotide selected from A, U, T, G and C or a nucleotide analogue thereof; and
wherein C is cytidine or an analogue thereof, and may be optionally replaced by a guanosine or an analogue thereof provided that its complementary nucleotide guanosine in stem1 is replaced by cytidine;
wherein
stem1 and stem2 are capable of base pairing with each other forming a reverse complementary sequence, wherein base pairing may occur between stem1 and stem2, or
forming a partially reverse complementary sequence, wherein an incomplete base pairing may occur between stem1 and stem2.

11. The artificial nucleic acid molecule according to any one of claims 2-10, wherein the at least one histone stem-loop is selected from at least one of following formulae (Ia) or (IIa): [chemical structure]
formula (Ia) (stem-loop sequence without stem bordering elements) [chemical structure]
formula (IIa) (stem-loop sequence with stem bordering elements)

12. The artificial nucleic acid molecule according to any one of claims 1-11, further comprising
d. a poly(A) sequence and/or a polyadenylation signal.

13. The artificial nucleic acid molecule according to claim 12, wherein the poly(A) sequence comprises or consists of a sequence of about 25 to about 400 adenosine nucleotides, preferably a sequence of about 50 to about 400 adenosine nucleotides, more preferably a sequence of about 50 to about 300 adenosine nucleotides, even more preferably a sequence of about 50 to about 250 adenosine nucleotides, most preferably a sequence of about 60 to about 250 adenosine nucleotides.

14. The artificial nucleic acid molecule according to claim 12 or 13, wherein the polyadenylation signal comprises the consensus sequence NN(U/T)ANA, with N=A or U, preferably AA(U/T)AAA or A(U/T)(U/T)AAA.

15. The artificial nucleic acid molecule according to any of claims 1-14, further comprising:
e. a poly(C) sequence.

16. The artificial nucleic acid molecule according to claim 15, wherein the poly(C) sequence comprises, preferably consists of, about 10 to about 200 cytidine nucleotides, more preferably about 10 to about 100 cytidine nucleotides, more preferably about 10 to about 50 cytidine nucleotides, even more preferably about 20 to about 40 cytidine nucleotides.

17. The artificial nucleic acid molecule according to any one of claims 1-16, further comprising:
f. at least one 3′UTR element.

18. The artificial nucleic acid molecule according to claim 17, wherein the at least one 3′UTR element comprises or consists of a nucleic acid sequence which is derived from a 3′UTR of a gene providing a stable mRNA or from a variant of the 3′UTR of a gene providing a stable mRNA.

19. The artificial nucleic acid molecule according to claim 17 or 18, wherein the at least one 3′UTR element and the at least one 5′UTR element act at least additively, preferably synergistically to increase protein production from said artificial nucleic acid molecule.

20. The artificial nucleic acid molecule according to any one of claims 1-19, wherein the 5′UTR element comprises or consists of a nucleic acid sequence which is derived from a nucleic acid sequence selected from the group consisting of SEQ ID NOs. 1-1363, SEQ ID NO. 1435, SEQ ID NO. 1461 or SEQ ID NO. 1462, from the homologs of any of SEQ ID NOs. 1-1363, SEQ ID NO. 1435, SEQ ID NO. 1461 or SEQ ID NO. 1462, or from a variant thereof.

21. The artificial nucleic acid molecule according to any one of claims 1-20, wherein the 5′UTR element comprises or consists of a nucleic acid sequence which has an identity of at least about 40%, preferably of at least about 50%, preferably of at least about 60%, preferably of at least about 70%, more preferably of at least about 80%, more preferably of at least about 90%, even more preferably of at least about 95%, even more preferably of at least about 99% to a nucleic acid sequence selected from SEQ ID NOs. 1-1363, SEQ ID NO. 1435, SEQ ID NO. 1461 or SEQ ID NO. 1462, or to a corresponding RNA sequence, or wherein the at least one 5′UTR element comprises or consists of a fragment of a nucleic acid sequence which has an identity of at least about 40%, preferably of at least about 50%, preferably of at least about 60%, preferably of at least about 70%, more preferably of at least about 80%, more preferably of at least about 90%, even more preferably of at least about 95%, even more preferably of at least about 99% to a nucleic acid sequence selected from SEQ ID NOs. 1-1363, SEQ ID NO. 1435, SEQ ID NO. 1461 or SEQ ID NO. 1462, or to a corresponding RNA sequence, preferably lacking the 5′TOP motif.

22. The artificial nucleic acid molecule according to any one of claims 1-21, wherein the 5′UTR element comprises or consists of a nucleic acid sequence which is derived from a 5′UTR of a TOP gene encoding a ribosomal protein or from a variant of a 5′UTR of a TOP gene encoding a ribosomal protein, preferably from a 5′UTR of a nucleic acid sequence according to any of SEQ ID NOs: 170, 232, 244, 259, 1284, 1285, 1286, 1287, 1288, 1289, 1290, 1291, 1292, 1293, 1294, 1295, 1296, 1297, 1298, 1299, 1300, 1301, 1302, 1303, 1304, 1305, 1306, 1307, 1308, 1309, 1310, 1311, 1312, 1313, 1314, 1315, 1316, 1317, 1318, 1319, 1320, 1321, 1322, 1323, 1324, 1325, 1326, 1327, 1328, 1329, 1330, 1331, 1332, 1333, 1334, 1335, 1336, 1337, 1338, 1339, 1340, 1341, 1342, 1343, 1344, 1346, 1347, 1348, 1349, 1350, 1351, 1352, 1353, 1354, 1355, 1356, 1357, 1358, 1359, or 1360;, a corresponding RNA sequence, a homolog thereof, or a variant thereof, preferably lacking the 5′TOP motif.

23. The artificial nucleic acid molecule according to any one of claims 1-22, wherein the 5′UTR element comprises or consists of a nucleic acid sequence which has an identity of at least about 40%, preferably of at least about 50%, preferably of at least about 60%, preferably of at least about 70%, more preferably of at least about 80%, more preferably of at least about 90%, even more preferably of at least about 95%, even more preferably of at least about 99% to the 5′UTR of a nucleic acid sequence according to any of SEQ ID NOs: 170, 232, 244, 259, 1284, 1285, 1286, 1287, 1288, 1289, 1290, 1291, 1292, 1293, 1294, 1295, 1296, 1297, 1298, 1299, 1300, 1301, 1302, 1303, 1304, 1305, 1306, 1307, 1308, 1309, 1310, 1311, 1312, 1313, 1314, 1315, 1316, 1317, 1318, 1319, 1320, 1321, 1322, 1323, 1324, 1325, 1326, 1327, 1328, 1329, 1330, 1331, 1332, 1333, 1334, 1335, 1336, 1337, 1338, 1339, 1340, 1341, 1342, 1343, 1344, 1346, 1347, 1348, 1349, 1350, 1351, 1352, 1353, 1354, 1355, 1356, 1357, 1358, 1359, or 1360; or to a corresponding RNA sequence, preferably lacking the 5′TOP motif, or wherein the at least one 5′UTR element comprises or consists of a fragment of a nucleic acid sequence which has an identity of at least about 40%, preferably of at least about 50%, preferably of at least about 60%, preferably of at least about 70%, more preferably of at least about 80%, more preferably of at least about 90%, even more preferably of at least about 95%, even more preferably of at least about 99% to the 5′UTR of a nucleic acid sequence according to SEQ ID NOs: 170, 232, 244, 259, 1284, 1285, 1286, 1287, 1288, 1289, 1290, 1291, 1292, 1293, 1294, 1295, 1296, 1297, 1298, 1299, 1300, 1301, 1302, 1303, 1304, 1305, 1306, 1307, 1308, 1309, 1310, 1311, 1312, 1313, 1314, 1315, 1316, 1317, 1318, 1319, 1320, 1321, 1322, 1323, 1324, 1325, 1326, 1327, 1328, 1329, 1330, 1331, 1332, 1333, 1334, 1335, 1336, 1337, 1338, 1339, 1340, 1341, 1342, 1343, 1344, 1346, 1347, 1348, 1349, 1350, 1351, 1352, 1353, 1354, 1355, 1356, 1357, 1358, 1359, or 1360; or to a corresponding RNA sequence, preferably lacking the 5′TOP motif.

24. The artificial nucleic acid molecule according to any one of claims 1-23, wherein the 5′UTR element is derived from a 5′UTR of a TOP gene encoding a ribosomal Large protein (RPL) or from a variant of a 5′UTR of a TOP gene encoding a ribosomal Large protein (RPL), preferably from a 5′UTR of a nucleic acid sequence according to any of SEQ ID NOs: 67, 259, 1284-1318, 1344, 1346, 1348-1354, 1357, 1461 and 1462, a corresponding RNA sequence, a homolog thereof, or a variant thereof, preferably lacking the 5′TOP motif.

25. The artificial nucleic acid molecule according to any one of claims 1-24, wherein the 5′UTR element comprises or consists of a nucleic acid sequence having an identity of at least about 40%, preferably of at least about 50%, preferably of at least about 60%, preferably of at least about 70%, more preferably of at least about 80%, more preferably of at least about 90%, even more preferably of at least about 95%, even more preferably of at least about 99% to the 5′UTR of a nucleic acid sequence according to any of SEQ ID NOs: 67, 259, 1284-1318, 1344, 1346, 1348-1354, 1357, 1461 and 1462, or to a corresponding RNA sequence, preferably lacking the 5′TOP motif, or wherein the at least one 5′UTR element comprises or consists of a fragment of a nucleic acid sequence which has an identity of at least about 40%, preferably of at least about 50%, preferably of at least about 60%, preferably of at least about 70%, more preferably of at least about 80%, more preferably of at least about 90%, even more preferably of at least about 95%, even more preferably of at least about 99% to the 5′UTR of a nucleic acid sequence according to SEQ ID No. SEQ ID NOs: 67, 259, 1284-1318, 1344, 1346, 1348-1354, 1357, 1461 and 1462 or to a corresponding RNA sequence, preferably lacking the 5′TOP motif.

26. The artificial nucleic acid molecule according to any one of claims 1-25, wherein the 5′UTR element comprises or consists of a nucleic acid sequence which is derived from the 5′UTR of a ribosomal protein Large 32 gene or from a variant thereof, preferably from the 5′UTR of a vertebrate ribosomal protein Large 32 (L32) gene or from a variant thereof, more preferably from the 5′UTR of a mammalian ribosomal protein Large 32 (L32) gene or from a variant thereof, most preferably from the 5′UTR of a human ribosomal protein Large 32 (L32) gene or from a variant thereof, wherein preferably the 5′UTR element, preferably the artificial nucleic acid molecule does not comprise the 5′TOP of said gene.

27. The artificial nucleic acid molecule according to any one of claims 1-26, wherein the 5′UTR element comprises or consists of a nucleic acid sequence which has an identity of at least about 40%, preferably of at least about 50%, preferably of at least about 60%, preferably of at least about 70%, more preferably of at least about 80%, more preferably of at least about 90%, even more preferably of at least about 95%, even more preferably of at least about 99% to the nucleic acid sequence according to SEQ ID NOs. 1368 or 1452-1460, or a corresponding RNA sequence, or wherein the at least one 5′UTR element comprises or consists of a fragment of a nucleic acid sequence which has an identity of at least about 40%, preferably of at least about 50%, preferably of at least about 60%, preferably of at least about 70%, more preferably of at least about 80%, more preferably of at least about 90%, even more preferably of at least about 95%, even more preferably of at least about 99% to the nucleic acid sequence according to SEQ ID NOs. 1368 or 1452-1460, or to a corresponding RNA sequence.

28. The artificial nucleic acid molecule according to any one of claims 21, 23, 25 and 27, wherein the fragment consists of a continuous stretch of nucleotides corresponding to a continuous stretch of nucleotides in the full-length sequence, which represents at least 20%, preferably at least 30%, more preferably at least 40%, more preferably at least 50%, even more preferably at least 60%, even more preferably at least 70%, even more preferably at least 80%, and most preferably at least 90% of the full-length sequence the fragment is derived from.

29. The artificial nucleic acid molecule according to any one of claims 1-28, wherein the at least one 5′UTR element exhibits a length of at least about 20 nucleotides, preferably of at least about 30 nucleotides, more preferably of at least about 40 nucleotides.

30. The artificial nucleic acid molecule according to any one of claims 1-29, wherein the 5′UTR element comprises or consists of a nucleic acid sequence which is derived from the 5′UTR of a TOP gene selected from RPSA, RPS2, RPS3, RPS3A, RPS4, RPS5, RPS6, RPS7, RPS8, RPS9, RPS10, RPS11, RPS12, RPS13, RPS14, RPS15, RPS15A, RPS16, RPS17, RPSis, RPS19, RPS20, RPS21, RPS23, RPS24, RPS25, RPS26, RPS27, RPS27A, RPS28, RPS29, RPS30, RPL3, RPL4, RPL5, RPL6, RPL7, RPL7A, RPL8, RPL9, RPL10, RPL10A, RPL11, RPL12, RPL13, RPL13A, RPL14, RPL15, RPL17, RPL18, RPL18A, RPL19, RPL21, RPL22, RPL23, RPL23A, RPL24, RPL26, RPL27, RPL27A, RPL28, RPL29, RPL30, RPL31, RPL32, RPL34, RPL35, RPL35A, RPL36, RPL36A, RPL37, RPL37A, RPL38, RPL39, RPL40, RPL41, RPLP0, RPLP1, RPLP2, RPLPs, UBA52 or from a variant thereof.

31. The artificial nucleic acid molecule according to any one of claims 2-30, wherein the at least one histone stem-loop comprises or consists of a nucleic acid sequence selected from the group consisting of SEQ ID NOs. 1391-1433, preferably from the group consisting of SEQ ID NOs. 1403-1433.

32. The artificial nucleic acid molecule according to any one of claims 2-31, wherein the histone stem-loop comprises or consists of a nucleic acid sequence having a sequence identity of at least about 75%, preferably of at least about 80%, preferably of at least about 85%, more preferably of at least about 90%, even more preferably of at least about 95% to the sequence according to SEQ ID NO. 1433 or to the corresponding RNA sequence, wherein preferably positions 6, 13 and 20 of the sequence having a sequence identity of at least about 75%, preferably of at least about 80%, preferably at least about 85%, more preferably at least about 90%, even more preferably at least about 95% to the sequence according to SEQ ID NO. 1433 or to the corresponding RNA sequence are conserved, i.e. are identical to the nucleotides at positions 6, 13 and 20 of SEQ ID NO. 1433 or to the corresponding RNA nucleotides.

33. The artificial nucleic acid molecule according to any one of claims 17-32, wherein the 3′UTR element comprises or consists of a nucleic acid sequence derived from a 3′UTR of a gene selected from the group consisting of an albumin gene, an α-globin gene, a β-globin gene, a tyrosine hydroxylase gene, a lipoxygenase gene, and a collagen alpha gene, or from a variant of a 3′UTR of a gene selected from the group consisting of an albumin gene, an α-globin gene, a β-globin gene, a tyrosine hydroxylase gene, a lipoxygenase gene, and a collagen alpha gene.

34. The artificial nucleic acid molecule according to any one of claims 17-33, wherein the at least one 3′UTR element comprises or consists of a nucleic acid sequence which is derived from the 3′UTR of a vertebrate albumin gene or from a variant thereof, preferably from the 3′UTR of a mammalian albumin gene or from a variant thereof, more preferably from the 3′UTR of a human albumin gene or from a variant thereof, even more preferably from the 3′UTR of the human albumin gene according to GenBank Accession number NM_000477.5 or from a variant thereof.

35. The artificial nucleic acid molecule according to any one of claims 17-33, wherein the at least one 3′UTR element comprises or consists of a nucleic acid sequence which is derived from the 3′UTR of a vertebrate α-globin gene or from a variant thereof, preferably from the 3′UTR of a mammalian α-globin gene or from a variant thereof, more preferably from the 3′UTR of a human α-globin gene or from a variant thereof.

36. The artificial nucleic acid molecule according to any one of claims 17-33, wherein the at least one 3′UTR element comprises or consists of a nucleic acid sequence which has an identity of at least about 40%, preferably of at least about 50%, preferably of at least about 60%, preferably of at least about 70%, more preferably of at least about 80%, more preferably of at least about 90%, even more preferably of at least about 95%, even more preferably of at least about 99% to a nucleic acid sequence selected from SEQ ID NOs. 1369-1377 and 1434 or to a corresponding RNA sequence, or wherein the at least one 3′UTR element comprises or consists of a fragment of a nucleic acid sequence which has an identity of at least about 40%, preferably of at least about 50%, preferably of at least about 60%, preferably of at least about 70%, more preferably of at least about 80%, more preferably of at least about 90%, even more preferably of at least about 95%, even more preferably of at least about 99% to a nucleic acid sequence selected from SEQ ID NOs. 1369-1377 and 1434 or to a corresponding RNA sequence.

37. The artificial nucleic acid molecule according to claim 36, wherein the fragment consists of a continuous stretch of nucleotides corresponding to a continuous stretch of nucleotides in the full-length sequence, which represents at least 20%, preferably at least 30%, more preferably at least 40%, more preferably at least 50%, even more preferably at least 60%, even more preferably at least 70%, even more preferably at least 80%, and most preferably at least 90% of the full-length sequence the fragment is derived from.

38. The artificial nucleic acid molecule according to any one of claims 17-37, wherein the 3′UTR element exhibits a length of at least about 40 nucleotides, preferably of at least about 50 nucleotides, preferably of at least about 75 nucleotides, more preferably of at least about 100 nucleotides, even more preferably of at least about 125 nucleotides, most preferably of at least about 150 nucleotides.

39. The artificial nucleic acid molecule according to any one of claims 1-38, wherein the artificial nucleic acid molecule, preferably the open reading frame, is at least partially G/C modified, preferably wherein the G/C content of the open reading frame is increased compared to the wild type open reading frame.

40. The artificial nucleic acid molecule according to any one of claims 1-39, wherein the open reading frame comprises a codon-optimized region, preferably, wherein the open reading frame is codon-optimized.

41. The artificial nucleic acid molecule according to any one of claims 1-40, which is an RNA, preferably an mRNA molecule.

42. A vector comprising:
a. at least one 5′-untranslated region element (5′UTR element) which comprises or consists of a nucleic acid sequence which is derived from the 5′UTR of a TOP gene or which is derived from a variant of the 5′UTR of a TOP gene; and
b. at least one open reading frame (ORF) and/or at least one cloning site.

43. The vector according to claim 42, further comprising:
c. at least one histone-stem loop.

44. The vector according to claim 42 or 43, wherein the 5′UTR element and the open reading frame are heterologous.

45. The vector according to any one of claims 42-44, wherein the 5′UTR element is suitable for increasing protein production from the vector.

46. The vector to any one of claims 43-45, wherein the 5′UTR element and the histone stem-loop act together, preferably at least additively, to increase protein production from the vector.

47. The vector according to any one of claims 42-46, wherein the 5′UTR element does not comprise a TOP-motif, preferably wherein the nucleic acid sequence which is derived from a 5′UTR of a TOP gene, preferably the 5′UTR element starts at its 5′-end with a nucleotide located at position 1, 2, 3, 4, 5, 6, 7, 8, 9 or 10 downstream of the polypyrimidine tract.

48. The vector according to any one of claims 42-47, wherein the nucleic acid sequence which is derived from a 5′UTR of a TOP gene, preferably the 5′UTR element terminates at its 3′-end with a nucleotide located at position 1, 2, 3, 4, 5, 6, 7, 8, 9 or upstream of the start codon of the gene it is derived from.

49. The vector according to any one of claims 42-48, wherein the 5′UTR element does not comprise a start codon or an open reading frame.

50. The vector according to any one of claims 42-49, wherein the nucleic acid sequence which is derived from the 5′UTR of a TOP gene is derived from the 5′UTR of a eukaryotic TOP gene or from a variant thereof, preferably from the 5′UTR of a plant or animal TOP gene or from a variant thereof, more preferably from the 5′UTR of a chordate TOP gene or from a variant thereof, even more preferably from the 5′UTR of a vertebrate TOP gene or from a variant thereof, most preferably from the 5′UTR of a mammalian TOP gene, such as a human TOP gene, or from a variant thereof.

51. The vector according to any one of claims 43-50, wherein the at least one histone stem-loop is selected from following formulae (I) or (II):
formula (I) (stem-loop sequence without stem bordering elements): [chemical structure]
formula (II) (stem-loop sequence with stem bordering elements): [chemical structure]
wherein:
stem1 or stem2 bordering elements N₁₋₆ is a consecutive sequence of 1 to 6, preferably of 2 to 6, more preferably of 2 to 5, even more preferably of 3 to 5, most preferably of 4 to 5 or 5 N, wherein each N is independently from another selected from a nucleotide selected from A, U, T, G and C, or a nucleotide analogue thereof;
stem1 [N₀₋₂GN₃₋₅] is reverse complementary or partially reverse complementary with element stem2, and is a consecutive sequence between of 5 to 7 nucleotides;
wherein N₀₋₂ is a consecutive sequence of 0 to 2, preferably of 0 to 1, more preferably of 1 N, wherein each N is independently from another selected from a nucleotide selected from A, U, T, G and C or a nucleotide analogue thereof;
wherein N₃₋₅ is a consecutive sequence of 3 to 5, preferably of 4 to 5, more preferably of 4 N, wherein each N is independently from another selected from a nucleotide selected from A, U, T, G and C or a nucleotide analogue thereof, and
wherein G is guanosine or an analogue thereof, and may be optionally replaced by a cytidine or an analogue thereof, provided that its complementary nucleotide cytidine in stem2 is replaced by guanosine;
loop sequence [N₀₋₄(U/T)N₀₋₄] is located between elements stem1 and stem2, and is a consecutive sequence of 3 to 5 nucleotides, more preferably of 4 nucleotides;
wherein each N₃₋₅ is independent from another a consecutive sequence of 0 to 4, preferably of 1 to 3, more preferably of 1 to 2 N, wherein each N is independently from another selected from a nucleotide selected from A, U, T, G and C or a nucleotide analogue thereof; and
wherein U/T represents uridine, or optionally thymidine;
stem2 [N₃₋₅CN₀₋₂] is reverse complementary or partially reverse complementary with element stem1, and is a consecutive sequence between of 5 to 7 nucleotides;
wherein N₃₋₅ is a consecutive sequence of 3 to 5, preferably of 4 to 5, more preferably of 4 N, wherein each N is independently from another selected from a nucleotide selected from A, U, T, G and C or a nucleotide analogue thereof;
wherein N₀₋₂ is a consecutive sequence of 0 to 2, preferably of 0 to 1, more preferably of 1 N, wherein each N is independently from another selected from a nucleotide selected from A, U, T, G and C or a nucleotide analogue thereof; and
wherein C is cytidine or an analogue thereof, and may be optionally replaced by a guanosine or an analogue thereof provided that its complementary nucleotide guanosine in stem1 is replaced by cytidine;
wherein
stem1 and stem2 are capable of base pairing with each other forming a reverse complementary sequence, wherein base pairing may occur between stem1 and stem2, or
forming a partially reverse complementary sequence, wherein an incomplete base pairing may occur between stem1 and stem2.

52. The vector according to any one of claims 43-51, wherein the at least one histone stem-loop is selected from at least one of following formulae (Ia) or (IIa): [chemical structure]
formula (Ia) (stem-loop sequence without stem bordering elements) [chemical structure]
formula (IIa) (stem-loop sequence with stem bordering elements)

53. The vector according to any one of claims 42-52, further comprising
d. a poly(A) sequence and/or a polyadenylation signal.

54. The vector according to claim 53, wherein the poly(A) sequence comprises or consists of a sequence of about 25 to about 400 adenosine nucleotides, preferably a sequence of about 50 to about 400 adenosine nucleotides, more preferably a sequence of about 50 to about 300 adenosine nucleotides, even more preferably a sequence of about 50 to about 250 adenosine nucleotides, most preferably a sequence of about 60 to about 250 adenosine nucleotides.

55. The vector according to claim 53 or 54, wherein the polyadenylation signal comprises the consensus sequence NN(U/T)ANA, with N-A or U, preferably AA(U/T)AAA or A(U/T)(U/T)AAA.

56. The vector according to any one of claims 42-55, further comprising:
e. a poly(C) sequence.

57. The vector according to claim 56, wherein the poly(C) sequence comprises, preferably consists of, about 10 to about 200 cytidine nucleotides, more preferably about 10 to about 100 cytidine nucleotides, more preferably about 10 to about 50 cytidine nucleotides, even more preferably about 20 to about 40 cytidine nucleotides.

58. The vector according to any one of claims 42-57, further comprising:
f. at least one 3′UTR element.

59. The vector according to claim 58, wherein the at least one 3′UTR element comprises or consists of a nucleic acid sequence which is derived from a 3′UTR of a gene providing a stable mRNA or from a variant of the 3′UTR of a gene providing a stable mRNA.

60. The vector according to claim 58 or 59, wherein the at least one 3′UTR element and the at least one 5′UTR element act at least additively, preferably synergistically to increase protein production from said vector.

61. The vector according to any one of claims 42-60, wherein the 5′UTR element comprises or consists of a nucleic acid sequence which is derived from a nucleic acid sequence selected from the group consisting of SEQ ID NOs. 1-1363, SEQ ID NO. 1435, SEQ ID NO. 1461 or SEQ ID NO. 1462, from the homologs of any of SEQ ID NOs. 1-1363, SEQ ID NO. 1435, SEQ ID NO. 1461 or SEQ ID NO. 1462,, or from a variant thereof.

62. The vector according to any one of claims 42-61, wherein the 5′UTR element comprises or consists of a nucleic acid sequence which has an identity of at least about 40%, preferably of at least about 50%, preferably of at least about 60%, preferably of at least about 70%, more preferably of at least about 80%, more preferably of at least about 90%, even more preferably of at least about 95%, even more preferably of at least about 99% to a nucleic acid sequence selected from SEQ ID NOs. 1-1363, SEQ ID NO. 1435, SEQ ID NO. 1461 or SEQ ID NO. 1462, or to a corresponding RNA sequence, preferably lacking the 5′TOP motif, or wherein the at least one 5′UTR element comprises or consists of a fragment of a nucleic acid sequence which has an identity of at least about 40%, preferably of at least about 50%, preferably of at least about 60%, preferably of at least about 70%, more preferably of at least about 80%, more preferably of at least about 90%, even more preferably of at least about 95%, even more preferably of at least about 99% to a nucleic acid sequence selected from SEQ ID NOs. 1-1363, SEQ ID NO. 1435, SEQ ID NO. 1461 or SEQ ID NO. 1462, or to a corresponding RNA sequence, preferably lacking the 5′TOP motif.

63. The vector according to any one of claims 42-62, wherein the 5′UTR element comprises or consists of a nucleic acid sequence which is derived from a 5′UTR of a TOP gene encoding a ribosomal protein or from a variant of a 5′UTR of a TOP gene encoding a ribosomal protein, preferably from a 5′UTR of a nucleic acid sequence according to any of SEQ ID NOs: 170, 232, 244, 259, 1284, 1285, 1286, 1287, 1288, 1289, 1290, 1291, 1292, 1293, 1294, 1295, 1296, 1297, 1298, 1299, 1300, 1301, 1302, 1303, 1304, 1305, 1306, 1307, 1308, 1309, 1310, 1311, 1312, 1313, 1314, 1315, 1316, 1317, 1318, 1319, 1320, 1321, 1322, 1323, 1324, 1325, 1326, 1327, 1328, 1329, 1330, 1331, 1332, 1333, 1334, 1335, 1336, 1337, 1338, 1339, 1340, 1341, 1342, 1343, 1344, 1346, 1347, 1348, 1349, 1350, 1351, 1352, 1353, 1354, 1355, 1356, 1357, 1358, 1359, or 1360, a corresponding RNA sequence, a homolog thereof, or a variant thereof as described herein, preferably lacking the 5′TOP motif.

64. The vector according to any one of claims 42-63, wherein the 5′UTR element comprises or consists of a nucleic acid sequence which has an identity of at least about 40%, preferably of at least about 50%, preferably of at least about 60%, preferably of at least about 70%, more preferably of at least about 80%, more preferably of at least about 90%, even more preferably of at least about 95%, even more preferably of at least about 99% to the 5′UTR of a nucleic acid sequence according to any of SEQ ID NOs: 170, 232, 244, 259, 1284, 1285, 1286, 1287, 1288, 1289, 1290, 1291, 1292, 1293, 1294, 1295, 1296, 1297, 1298, 1299, 1300, 1301, 1302, 1303, 1304, 1305, 1306, 1307, 1308, 1309, 1310, 1311, 1312, 1313, 1314, 1315, 1316, 1317, 1318, 1319, 1320, 1321, 1322, 1323, 1324, 1325, 1326, 1327, 1328, 1329, 1330, 1331, 1332, 1333, 1334, 1335, 1336, 1337, 1338, 1339, 1340, 1341, 1342, 1343, 1344, 1346, 1347, 1348, 1349, 1350, 1351, 1352, 1353, 1354, 1355, 1356, 1357, 1358, 1359, or 1360 or to a corresponding RNA sequence, preferably lacking the 5′TOP motif, or wherein the at least one 5′UTR element comprises or consists of a fragment of a nucleic acid sequence which has an identity of at least about 40%, preferably of at least about 50%, preferably of at least about 60%, preferably of at least about 70%, more preferably of at least about 80%, more preferably of at least about 90%, even more preferably of at least about 95%, even more preferably of at least about 99% to the 5′UTR of a nucleic acid sequence according to SEQ ID NOs: 170, 232, 244, 259, 1284, 1285, 1286, 1287, 1288, 1289, 1290, 1291, 1292, 1293, 1294, 1295, 1296, 1297, 1298, 1299, 1300, 1301, 1302, 1303, 1304, 1305, 1306, 1307, 1308, 1309, 1310, 1311, 1312, 1313, 1314, 1315, 1316, 1317, 1318, 1319, 1320, 1321, 1322, 1323, 1324, 1325, 1326, 1327, 1328, 1329, 1330, 1331, 1332, 1333, 1334, 1335, 1336, 1337, 1338, 1339, 1340, 1341, 1342, 1343, 1344, 1346, 1347, 1348, 1349, 1350, 1351, 1352, 1353, 1354, 1355, 1356, 1357, 1358, 1359, or 1360 or to a corresponding RNA sequence, preferably lacking the 5′TOP motif.

65. The vector according to any one of claims 42-64, wherein the 5′UTR element is derived from a 5′UTR of a TOP gene encoding a ribosomal Large protein (RPL) or from a variant of a 5′UTR of a TOP gene encoding a ribosomal Large protein (RPL), preferably from a 5′UTR of a nucleic acid sequence according to any of SEQ ID NOs: 67, 259, 1284-1318, 1344, 1346, 1348-1354, 1357, 1461 and 1462, a corresponding RNA sequence, a homolog thereof, or a variant thereof, preferably lacking the 5′TOP motif.

66. The vector according to any one of claims 42-65, wherein the 5′UTR element comprises or consists of a nucleic acid sequence having an identity of at least about 40%, preferably of at least about 50%, preferably of at least about 60%, preferably of at least about 70%, more preferably of at least about 80%, more preferably of at least about 90%, even more preferably of at least about 95%, even more preferably of at least about 99% to the 5′UTR of a nucleic acid sequence according to any of SEQ ID NOs: 67, 259, 1284-1318, 1344, 1346, 1348-1354, 1357, 1461 and 1462 or to a corresponding RNA sequence, preferably lacking the 5′TOP motif, or wherein the at least one 5′UTR element comprises or consists of a fragment of a nucleic acid sequence which has an identity of at least about 40%, preferably of at least about 50%, preferably of at least about 60%, preferably of at least about 70%, more preferably of at least about 80%, more preferably of at least about 90%, even more preferably of at least about 95%, even more preferably of at least about 99% to the 5′UTR of a nucleic acid sequence according to SEQ ID No. SEQ ID NOs: 67, 259, 1284-1318, 1344, 1346, 1348-1354, 1357, 1461 and 1462 or to a corresponding RNA sequence, preferably lacking the 5′TOP motif.

67. The vector according to any one of claims 42-66, wherein the 5′UTR element comprises or consists of a nucleic acid sequence which is derived from the 5′UTR of a ribosomal protein Large 32 gene, preferably from the 5′UTR of a vertebrate ribosomal protein Large 32 (L32) gene or from a variant thereof, more preferably from the 5′UTR of a mammalian ribosomal protein Large 32 (L32) gene or from a variant thereof, most preferably from the 5′UTR of a human ribosomal protein Large 32 (L32) gene or from a variant thereof, wherein preferably the 5′UTR element does not comprise the 5′TOP of said gene.

68. The vector according to any one of claims 42-67, wherein the 5′UTR element comprises or consists of a nucleic acid sequence which has an identity of at least about 40%, preferably of at least about 50%, preferably of at least about 60%, preferably of at least about 70%, more preferably of at least about 80%, more preferably of at least about 90%, even more preferably of at least about 95%, even more preferably of at least about 99% to the nucleic acid sequence according to SEQ ID NOs. 1368 or 1452-1460 or to a corresponding RNA sequence, or wherein the at least one 5′UTR element comprises or consists of a fragment of a nucleic acid sequence which has an identity of at least about 40%, preferably of at least about 50%, preferably of at least about 60%, preferably of at least about 70%, more preferably of at least about 80%, more preferably of at least about 90%, even more preferably of at least about 95%, even more preferably of at least about 99% to the nucleic acid sequence according to SEQ ID NOs. 1368 or 1452-1460 or to a corresponding RNA sequence.

69. The vector according to any one of claims 62, 64, 66 and 68, wherein the fragment consists of a continuous stretch of nucleotides corresponding to a continuous stretch of nucleotides in the full-length sequence, which represents at least 20%, preferably at least 30%, more preferably at least 40%, more preferably at least 50%, even more preferably at least 60%, even more preferably at least 70%, even more preferably at least 80%, and most preferably at least 90% of the full-length sequence the fragment is derived from.

70. The vector according to any one of claims 42-69, wherein the at least one 5′UTR element exhibits a length of at least about 20 nucleotides, preferably of at least about 30 nucleotides, more preferably of at least about 40 nucleotides.

71. The vector according to any one of claims 42-70, wherein the 5′UTR element comprises or consists of a nucleic acid sequence which is derived from the 5′UTR of a TOP gene selected from RPSA, RPS2, RPS3, RPS3A, RPS4, RPS5, RPS6, RPS7, RPS8, RPS9, RPS10, RPS11, RPS12, RPS13, RPS14, RPS15, RPS15A, RPS16, RPS17, RPS18, RPS19, RPS20, RPS21, RPS23, RPS24, RPS25, RPS26, RPS27, RPS27A, RPS28, RPS29, RPS30, RPL3, RPL4, RPL5, RPL6, RPL7, RPL7A, RPL8, RPL9, RPL10, RPL10A, RPL11, RPL12, RPL13, RPL13A, RPL14, RPL15, RPL17, RPL18, RPL18A, RPL19, RPL21, RPL22, RPL23, RPL23A, RPL24, RPL26, RPL27, RPL27A, RPL28, RPL29, RPL30, RPL31, RPL32, RPL34, RPL35, RPL35A, RPL36, RPL36A, RPL37, RPL37A, RPL38, RPL39, RPL40, RPL41, RPLP0, RPLP1, RPLP2, RPLP3, UBA52or from a variant thereof.

72. The vector according to any one of claims 43-71, wherein the at least one histone stem-loop comprises or consists of a nucleic acid sequence selected from the group consisting of SEQ ID NOs. 1391-1433, preferably from the group consisting of SEQ ID NOs. 1403-1433.

73. The vector according to any one of claims 43-72, wherein the histone stem-loop comprises or consists of a nucleic acid sequence having a sequence identity of at least about 75%, preferably of at least about 80%, preferably at least about 85%, more preferably at least about 90%, even more preferably at least about 95% to the sequence according to SEQ ID NO. 1433 or to the corresponding RNA sequence, wherein preferably positions 6, 13 and 20 of the sequence having a sequence identity of at least about 75%, preferably of at least about 80%, preferably at least about 85%, more preferably at least about 90%, even more preferably at least about 95% to the sequence according to SEQ ID NO. 1433 or to the corresponding RNA sequence are conserved, i.e. are identical to the nucleotides at positions 6, 13 and 20 of SEQ ID NO. 1433 or to the corresponding RNA nucleotides.

74. The vector according to any one of claims 58-73, wherein the 3′UTR element comprises or consists of a nucleic acid sequence derived from a 3′UTR of a gene selected from the group consisting of an albumin gene, an α-globin gene, a β-globin gene, a tyrosine hydroxylase gene, a lipoxygenase gene, and a collagen alpha gene, or from a variant of a 3′UTR of a gene selected from the group consisting of an albumin gene, an α-globin gene, a β-globin gene, a tyrosine hydroxylase gene, a lipoxygenase gene, and a collagen alpha gene.

75. The vector according to any one of claims 58-74, wherein the at least one 3′UTR element comprises or consists of a nucleic acid sequence which is derived from the 3′UTR of a vertebrate albumin gene or from a variant thereof, preferably from the 3′UTR of a mammalian albumin gene or from a variant thereof, more preferably from the 3′UTR of a human albumin gene or from a variant thereof, even more preferably from the 3′UTR of the human albumin gene according to GenBank Accession number NM_000477.5 or from a variant thereof.

76. The vector according to any one of claims 58-74, wherein the at least one 3′UTR element comprises or consists of a nucleic acid sequence which is derived from the 3′UTR of a vertebrate α-globin gene or from a variant thereof, preferably from the 3′UTR of a mammalian α-globin gene or from a variant thereof, more preferably from the 3′UTR of a human α-globin gene or from a variant thereof.

77. The vector according to any one of claims 58-74, wherein the at least one 3′UTR element comprises or consists of a nucleic acid sequence which has an identity of at least about 40%, preferably of at least about 50%, preferably of at least about 60%, preferably of at least about 70%, more preferably of at least about 80%, more preferably of at least about 90%, even more preferably of at least about 95%, even more preferably of at least about 99% to a nucleic acid sequence selected from SEQ ID NOs. 1369-1377 and 1434 or to a corresponding RNA sequence, or wherein the at least one 3′UTR element comprises or consists of a fragment of a nucleic acid sequence which has an identity of at least about 40%, preferably of at least about 50%, preferably of at least about 60%, preferably of at least about 70%, more preferably of at least about 80%, more preferably of at least about 90%, even more preferably of at least about 95%, even more preferably of at least about 99% to a nucleic acid sequence selected from SEQ ID NOs. 1369-1377 and 1434 or to a corresponding RNA sequence.

78. The vector according to claim 77, wherein the fragment consists of a continuous stretch of nucleotides corresponding to a continuous stretch of nucleotides in the full-length sequence, which represents at least 20%, preferably at least 30%, more preferably at least 40%, more preferably at least 50%, even more preferably at least 60%, even more preferably at least 70%, even more preferably at least 80%, and most preferably at least 90% of the full-length sequence the fragment is derived from.

79. The vector according to any one of claims 58-78, wherein the 3′UTR element exhibits a length of at least about 40 nucleotides, preferably of at least about 50 nucleotides, preferably of at least about 75 nucleotides, more preferably of at least about 100 nucleotides, even more preferably of at least about 125 nucleotides, most preferably of at least about 150 nucleotides.

80. The vector according to any one of claims 42-79, wherein the vector, preferably the open reading frame, is at least partially G/C modified, preferably wherein the G/C content of the open reading frame is increased compared to the wild type open reading frame.

81. The vector according to any one of claims 42-80, wherein the open reading frame comprises a codon-optimized region, preferably, wherein the open reading frame is codon-optimized.

82. The vector according to any one of claims 42-81, which is a DNA vector.

83. The vector according to any one of claims 42-82, which is a plasmid vector or a viral vector, preferably a plasmid vector.

84. The vector according to any one of claims 42-83, which comprises or codes for an artificial nucleic acid molecule according to any one of claims 1-41.

85. The vector according to any one of claims 42-84, which is a circular molecule.

86. A cell comprising the artificial nucleic acid molecule according to any one of claims 1-41 or the vector according to any one of claims 42-85.

87. The cell according to claim 86, which is a mammalian cell.

88. The cell according to claim 86 or 87, which is a cell of a mammalian subject, preferably an isolated cell of a mammalian subject, preferably of a human subject.

89. A pharmaceutical composition comprising the artificial nucleic acid molecule according to any one of claims 1-41, the vector according to any one of claims 42-85, or the cell according to any one of claims 86-88.

90. The pharmaceutical composition according to claim 89, further comprising one or more pharmaceutically acceptable diluents and/or excipients and/or one or more adjuvants.

91. The artificial nucleic acid molecule according to any one of claims 1-41, the vector according to any one of claims 42-85, the cell according to any one of claims 86-88, or the pharmaceutical composition according to claim 89 or 90 for use as a medicament.

92. The artificial nucleic acid molecule according to any one of claims 1-41, the vector according to any one of claims 42-85, the cell according to any one of claims 86-88, or the pharmaceutical composition according to claim 89 or 90 for use as a vaccine or for use in gene therapy.

93. A method for treating or preventing a disorder comprising administering the artificial nucleic acid molecule according to any one of claims 1-41, the vector according to any one of claims 42-85, the cell according to any one of claims 86-88,
or the pharmaceutical composition according to claim 89 or 90 to a subject in need thereof.

94. A method of treating or preventing a disorder comprising transfection of a cell with the artificial nucleic acid molecule according to any one of claims 1-41 or the vector according to any one of claims 42-85.

95. The method according to claim 94, wherein transfection of a cell is performed in vitro/ex vivo and the transfected cell is administered to a subject in need thereof, preferably to a human patient.

96. The method according to claim 95, wherein the cell which is to be transfected in vitro is an isolated cell of the subject, preferably of the human patient.

97. The method according to any one of claims 93-96, which is a vaccination method or a gene therapy method.

98. A method for increasing protein production from an artificial nucleic acid molecule, comprising the step of providing the artificial nucleic acid molecule with
i. at least one 5′-untranslated region element (5′UTR element) which comprises or consists of a nucleic acid sequence which is derived from the 5′UTR of a TOP gene or which is derived from a variant of the 5′UTR of a TOP gene;
ii. preferably at least one histone stem-loop; and
iii. optionally, a poly(A) sequence and/or a polyadenylation signal.

99. Use of a 5′UTR element which comprises or consists of a nucleic acid sequence which is derived from the 5′UTR of a TOP gene or which is derived from a variant of the 5′UTR of a TOP gene and preferably at least one histone stem-loop for increasing protein production from a nucleic acid molecule.

100. A kit or kit of parts comprising an artificial nucleic acid molecule according to any one of claims 1-41, the vector according to any one of claims 42-85, the cell according to any one of claims 86-88, and/or the pharmaceutical composition according to claim 89 or 90.

101. The kit according to claim 100, further comprising instructions for use, cells for transfection, an adjuvant, a means for administration of the pharmaceutical composition, a pharmaceutically acceptable carrier and/or a pharmaceutically acceptable solution for dissolution or dilution of the artificial nucleic acid molecule, the vector or the pharmaceutical composition.

The application's sequence listing, which the Patent Office published only in electronic form, follows.

SEQUENCE LISTING (1481 sequences)

SEQ ID NO: 1 - DNA, 21 bp, Homo sapiens
  source 1..21: mol_type = other DNA
gctccttctttctgcaacatg

SEQ ID NO: 2 - DNA, 108 bp, Homo sapiens
  source 1..108: mol_type = other DNA
ggctctctttccgcgctgcggtcagcctcggcgtcccacagagagggccagaggtggaaacgcagaaaaccaaaccaggactatcagagattgcccggagaggggatg

SEQ ID NO: 3 - DNA, 69 bp, Homo sapiens
  source 1..69: mol_type = other DNA
cttcctcttcttgatcggggattcaggaaggagcccaggagcagaggaagtagagagagagacaacatg

SEQ ID NO: 4 - DNA, 159 bp, Homo sapiens
  source 1..159: mol_type = other DNA
tgtccttcctctctggactgtaagaatatgtctccagggccagtgtctgctgcgatcgagtcccaccttccaagtcctggcatctcaatgcatctgggaagctacctgcattaagtcaggactgagcacacaggtgaactccagaaagaagaagctatg

SEQ ID NO: 5 - DNA, 57 bp, Homo sapiens
  source 1..57: mol_type = other DNA
tgaccttttccctcccgcggctctctacctctcgccgcccctagggaggacaccatg

SEQ ID NO: 6 - DNA, 168 bp, Homo sapiens
  source 1..168: mol_type = other DNA
gggcctctctagcttgcggcctgtgtctatggtcgggccctctgcgtccagctgctccggaccgagctcgggtgtatggggccgtaggaaccggctccggggccccgataacgggccgcccccacagcaccccgggctggcgtgagggtctcccttgatctgagaatg

SEQ ID NO: 7 - DNA, 53 bp, Homo sapiens
  source 1..53: mol_type = other DNA
agctcttctactccactgctgtctatcttgcctgccggcacccagccaccatg

SEQ ID NO: 8 - DNA, 89 bp, Homo sapiens
  source 1..89: mol_type = other DNA
cttcctctacccggttggcaggcggcctggcccagccccttctctaaggaagcgcatttcctgcctccctgggccggccgggctggatg

SEQ ID NO: 9 - DNA, 28 bp, Homo sapiens
  source 1..28: mol_type = other DNA
tcttctctctgctgctgtagctgccatg

SEQ ID NO: 10 - DNA, 246 bp, Homo sapiens
  source 1..246: mol_type = other DNA
ctgtctttcttccgggaggcggtgacagctgctgagacgtgttgcagccagagtctctccgctttaatgcgctcccattagtgccgtcccccactggaaaaccgtggcttctgtattatttgccatctttgttgtgtaggagcagggagggcttcctcccggggtcctaggcggcggtgcagtccgtcgtagaagaattagagtagaagttgtcggggtccgctcttaggacgcagccgcctcatg

SEQ ID NO: 11 - DNA, 211 bp, Homo sapiens
  source 1..211: mol_type = other DNA
cgtcccctcgcagttcggcggtcccgcgggtctgtctcttgcttcaacagtgtttggacggaacagatccggggactctcttccagcctccgaccgccctccgatttcctctccgcttgcaacctccgggaccatcttctcggccatctcctgcttctgggacctgccagcaccgtttttgtggttagctccttcttgccaaccaaccatg

SEQ ID NO: 12 - DNA, 40 bp, Homo sapiens
  source 1..40: mol_type = other DNA
ccgcctccctgggcgccggagtcatgtgacccacacaatg

SEQ ID NO: 13 - DNA, 181 bp, Homo sapiens
  source 1..181: mol_type = other DNA
ttttctttcattagggggaaggcgtgaggaaagtaccaaacagcagcggagttttaaactttaaatagacaggtctgagtgcctgaacttgccttttcattttacttcatcctccaaggagttcaatcacttggcgtgacttcactacttttaagcaaaagagtggtgcccaggcaacatg

SEQ ID NO: 14 - DNA, 68 bp, Homo sapiens
  source 1..68: mol_type = other DNA
cattctctgggaaagggcagcagcagccaggtgtggcagtgacagggaggtgtgaatgaggcaggatg

SEQ ID NO: 15 - DNA, 55 bp, Homo sapiens
  source 1..55: mol_type = other DNA
cgctccttcctcctcggctcgcgtctcactcagtgtaccttctagtcccgccatg

SEQ ID NO: 16 - DNA, 22 bp, Homo sapiens
  source 1..22: mol_type = other DNA
ctgtcctcttcagctcaagatg

SEQ ID NO: 17 - DNA, 111 bp, Homo sapiens
  source 1..111: mol_type = other DNA
gggccctttctgggcaggacccgccccttggtcccgcagagccttggtacttggacctgaaccttgctccgagagggagtcctcgcggacgtcagccaagattccagaatg

SEQ ID NO: 18 - DNA, 113 bp, Homo sapiens
  source 1..113: mol_type = other DNA
cttccttttgcagcaagttctttcctgcactaatcacaattcttggaagaggagaactggacgttgtgaacagagttagctggtaaatgtcctcttaaaagatccaaaaaatg

SEQ ID NO: 19 - DNA, 146 bp, Homo sapiens
  source 1..146: mol_type = other DNA
agccctttctccagggacagttgctgaagcttcatcctttgctctcattctgtaagtcatagaaaagtttgaaacattctgtctgtggtagagctcgggccagctgtagttcattcgccagtgtgcttttcttaatatctaagatg

SEQ ID NO: 20 - DNA, 79 bp, Homo sapiens
  source 1..79: mol_type = other DNA
ggtcccctatccgcaccccggcccctgagagctggcactgcgactcgagacagcggcccggcaggacagctccagaatg

SEQ ID NO: 21 - DNA, 178 bp, Homo sapiens
  source 1..178: mol_type = other DNA
ccccctcttcctcctcctcaagggaaagctgcccacttctagctgccctgccatcccctttaaagggcgacttgctcagcgccaaaccgcggctccagccctctccagcctccggctcagccggctcatcagtcggtccgcgccttgcagctcctccagagggacgcgccccgagatg

SEQ ID NO: 22 - DNA, 21 bp, Homo sapiens
  source 1..21: mol_type = other DNA
ggctcttctggcgccaaaatg

SEQ ID NO: 23 - DNA, 170 bp, Homo sapiens
  source 1..170: mol_type = other DNA
cttccttcctgaccggcgcgcgcagcctgctgccgcggtcagcgcctgctcctgctcctccgctcctcctgcgcggggtgctgaaacagcccggggaagtagagccgcctccggggagcccaaccagccgaacgccgccggcgtcagcagccttgcgcggccacagcatg

SEQ ID NO: 24 - DNA, 615 bp, Homo sapiens
  source 1..615: mol_type = other DNA
gcgcctctcttccgccaggcatcccagaggtcctggtggtttcatttccgggtgcggcttctgtcataaagcggagacctcccttcaaacgtggcgtcgtgggttgtttgcgcctcgcctggggtcagcgagcaaggacgggcgcgggcggggatactcaaagccaacagctggagtcagcccttgtgtcccgggctcacagtggcacgactgaatcctcagagtcggctggcttttgagctctcacgattggggaggagggggcgtttctggttcgcagctccagaggattgcgttccttcccccatacctgtcccccacagtcacgctctgccctgacgtgcagcatttgacaagttaccccctcgccacatactacttccacccacgtccgagttaactttgttcttaaccttcttgagactaccctcggcctccaggtctttttttcccagttcatttttgcccataagattgagtttcgagtttcagatatcatgcagaaagtttacctttaagactgagcacccatctgatactcttcctcccgaaaaagttcatgctcacgagagagtttgtgggaaaagtgaaagccagtacacgcaggaaactatg

SEQ ID NO: 25 - DNA, 38 bp, Homo sapiens
  source 1..38: mol_type = other DNA
cgctccttcaccctcctcgttggtgtcctgtcaccatg

SEQ ID NO: 26 - DNA, 177 bp, Homo sapiens
  source 1..177: mol_type = other DNA
gagccttcttgtcagcatctgttagtggaggttgggaagcctctcctccttccccctccctctttgcctccacctggctcctccccatgttcgtccatcacccctcccccctttcccaaggacaatctgcaagaaagcagcggcggaggagagctaagactaaaagagtggatcatg

SEQ ID NO: 27 - DNA, 54 bp, Homo sapiens
  source 1..54: mol_type = other DNA
ctgtctcctcagcttcaggcaccaccactgacctgggacagtgaatcgacaatg

SEQ ID NO: 28 - DNA, 848 bp, Homo sapiens
  source 1..848: mol_type = other DNA
agttctctcctctcggaagctgcagccatgatggaagtttgagagttgagccgctgtgaggcgaggccgggctcaggcgagggagatgagagacggcggcggccgcggcccggagcccctctcagcgcctgtgagcagccgcgggggcagcgccctcggggagccggccggcctgcggcggcggcagcggcggcgtttctcgcctcctcttcgtcttttctaaccgtgcagcctcttcctcggcttctcctgaaagggaaggtggaagccgtgggctcgggcgggagccggctgaggcgcggcggcggcggcggcacctcccgctcctggagcgggggggagaagcggcggcggcggcggccgcggcggctgcagctccagggagggggtctgagtcgcctgtcaccatttccagggctgggaacgccggagagttggtctctccccttctactgcctccaacacggcggcggcggcggcggcacatccagggacccgggccggttttaaacctcccgtccgccgccgccgcaccccccgtggcccgggctccggaggccgccggcggaggcagccgttcggaggattattcgtcttctccccattccgctgccgccgctgccaggcctctggctgctgaggagaagcaggcccagtcgctgcaaccatccagcagccgccgcagcagccattacccggctgcggtccagagccaagcggcggcagagcgaggggcatcagctaccgccaagtccagagccatttccatcctgcagaagaagccccgccaccagcagcttctgccatctctctcctcctttttcttcagccacaggctcccagacatg

SEQ ID NO: 29 - DNA, 50 bp, Homo sapiens
  source 1..50: mol_type = other DNA
cctcccttactgcaggaaggcactccgaagacataagtcggtgagacatg

SEQ ID NO: 30 - DNA, 58 bp, Homo sapiens
  source 1..58: mol_type = other DNA
ccgcctcccactccccagcgcccccggaccgtgcagttctctgcaggaccaggccatg

SEQ ID NO: 31 - DNA, 187 bp, Homo sapiens
  source 1..187: mol_type = other DNA
gtttctcccagcctcagcctccccgccgccgccgccgccgccgccgccgagccggtttcctttttccggcgctccgggtgcgagagacaggtcgggccccctaggcagcgagccgcagcgcaatcccggcgctcgcccaaggaccctggaagctaccgttaccccgccgggcagcgtgggcgccatg

SEQ ID NO: 32 - DNA, 143 bp, Homo sapiens
  source 1..143: mol_type = other DNA
cctcctcctcttacccaaattttccagccgatcactggagctgacttccgcaatcccgatggaataaatctagcacccctgatggtgtgcccacactttgctgccgaaacgaagccagacaacagatttccatcagcaggatg

SEQ ID NO: 33 - DNA, 95 bp, Homo sapiens
  source 1..95: mol_type = other DNA
gcttctttgcgtaaccaatactggaaggcatttaaaggcacctctgccgccacagaccttgcagttaactccgccctgacccacccttcccgatg

SEQ ID NO: 34 - DNA, 77 bp, Homo sapiens
  source 1..77: mol_type = other DNA
ccgcctcctcctgtcccgcagtcggcgtccagcggctctgcttgttcgtgtgtgtgtcgttgcaggccttattcatg

SEQ ID NO: 35 - DNA, 254 bp, Homo sapiens
  source 1..254: mol_type = other DNA
ctctctctgcttctttccttttctctctcatggtagggttatgagtcagttgccaaaaggtggggacatttcctgatgcatttgcaacactgagaagttatcttaagggaggctgggccccattctactcatctggcccagaaagtgaacaccttgggggccactaaggcagccctgctaggggagacgctccaacctgtcttctctctgtctcctggcagctctcttggcctcctagtttctacctaatcatg

SEQ ID NO: 36 - DNA, 31 bp, Homo sapiens
  source 1..31: mol_type = other DNA
cagcctcctcctgcctcaccgcccgaagatg

SEQ ID NO: 37 - DNA, 314 bp, Homo sapiens
  source 1..314: mol_type = other DNA
ccgccccttctcgagaactcgcagagctgggctggtaaaattgcagtgctgaagacactggacccgcaaaaggctgtccctcccaaacctgggattctgggctcactgagttcacctgcgagtcagccctacctgcactgctctggtctagtacaaacaggctgctggcattgagggacggagtctccaactcctggcctctagcagtcctcctgtgtaggtctcccaaagtgctagtgtgtccggaattggtgggttcttggtctcactgacttcaagaatgaagccgcggaccctcgcagtctgctacaatg

SEQ ID NO: 38 - DNA, 39 bp, Homo sapiens
  source 1..39: mol_type = other DNA
ttttctcttctgtcaaccccacacgcctttggcacaatg

SEQ ID NO: 39 - DNA, 335 bp, Homo sapiens
  source 1..335: mol_type = other DNA
ctccctctagcgccttccccccggcccgactccgctggtcagcgccaagtgacttacgcccccgaccctgagcccggaccgctaggcgaggaggatcagatctccgctcgagaatctgaaggtgccctggtcctggaggagttccgtcccagcccgcggtctcccggtactgtcgggccccggccctctggagcttcaggaggcggccgtcagggtcggggagtatttgggtccggggtctcagggaagggcggcgcctgggtctgcggtatcggaaagagcctgctggagccaagtagccctccctctcttgggacagacccctcggtcccatg

SEQ ID NO: 40 - DNA, 98 bp, Homo sapiens
  source 1..98: mol_type = other DNA
ctccctccctctttccctcacagccgacgaggcaacaattaggctttggggataaaacgaggtgcggagagcgggctggggcatttctccccgagatg

SEQ ID NO: 41 - DNA, 41 bp, Homo sapiens
  source 1..41: mol_type = other DNA
cactcttctggtccccacagactcagagagaacccaccatg

SEQ ID NO: 42 - DNA, 84 bp, Homo sapiens
  source 1..84: mol_type = other DNA
cttcctctgatccgggccgggcgggaagtcgggtcccgaggctccggctcggcagaccgggcggaaagcagccgagcggccatg

SEQ ID NO: 43 - DNA, 48 bp, Homo sapiens
  source 1..48: mol_type = other DNA
cggcctttccagggccggggaaccccaggaggaagctgctgagccatg

SEQ ID NO: 44 - DNA, 166 bp, Homo sapiens
  source 1..166: mol_type = other DNA
cactctctttacagtcagccttctgcttgccacagtcatagtgggcagtcagtgaatcttccccaagtgctgacaattaatacctggtttagcggcaaagattcagagaggcgtgagcagcccctctggccttcagacaaaaatctacgtaccatcagaaactatg

SEQ ID NO: 45 - DNA, 132 bp, Homo sapiens
  source 1..132: mol_type = other DNA
tctccttttacacaaatagccccggatatctgtgttaccagccttgtctcggccacctcaaggataatcactaaattctgccgaaaggactgaggaacggtgcctggaaaagggcaagaatatcacggcatg

SEQ ID NO: 46 - DNA, 59 bp, Homo sapiens
  source 1..59: mol_type = other DNA
tggtccctttagggctccggatatctttggtgacttgtccactccagtgtggcatcatg

SEQ ID NO: 47 - DNA, 87 bp, Homo sapiens
  source 1..87: mol_type = other DNA
aaacctcttcgaggcacaaggcacaacaggctgctctgggattctcttcagccaatcttcattgctcaagtgtctgaagcagccatg

SEQ ID NO: 48 - DNA, 209 bp, Homo sapiens
  source 1..209: mol_type = other DNA
ctgtctctcttcatttaagcacgactctgcagaaggaacaaagcaccctccccactgggctcctggttgcagagctccaagtcctcacacagatacgcctgtttgagaagcagcgggcaagaaagacgcaagcccagaggccctgccatttctgtgggctcaggtccctactggctcaggcccctgcctccctcggcaaggccacaatg

SEQ ID NO: 49 - DNA, 185 bp, Homo sapiens
  source 1..185: mol_type = other DNA
agccctctgccctttctgagcccgagggactgccacctccactgtgtgcacactcagctacgggacacatttcaggtatccaaggcagcagaggtgagtgggtcccccgagctctgtgaccttatgctccacactaactctggcagagcctccgtttcctcatagaacaaagaacagccaccatg

SEQ ID NO: 50 - DNA, 111 bp, Homo sapiens
  source 1..111: mol_type = other DNA
tgccctccttccctgtctctgcctctccctcccttcctcaggcatcagagcggagacttcagggagaccagagcccagcttgccaggcactgagctagaagccctgccatg

SEQ ID NO: 51 - DNA, 72 bp, Homo sapiens
  source 1..72: mol_type = other DNA
ccgcccctcccgcggccccgcccctcccgcggcccgtcagcctctgccgcggagctgcgtccgccactcatg

SEQ ID NO: 52 - DNA, 123 bp, Homo sapiens
  source 1..123: mol_type = other DNA
cttcctttaaaatcctataaaatcagaagcccaagtctccactgccagtgtgaaatcttcagagaagaatttctctttagttctttgcaagaaggtagagataaagacactttttcaaaaatg

SEQ ID NO: 53 - DNA, 60 bp, Homo sapiens
  source 1..60: mol_type = other DNA
ttttctctctgattctccagcgacaggacccggcgccgggcactgagcaccgccaccatg

SEQ ID NO: 54 - DNA, 110 bp, Homo sapiens
  source 1..110: mol_type = other DNA
ctttctctgtctgccagggtctccgactgtcccagacgggctggtgtgggcttgggatcctcctggtgacctctcccgctaaggtccctcagccactctgccccaagatg

SEQ ID NO: 55 - DNA, 151 bp, Homo sapiens
  source 1..151: mol_type = other DNA
ccctccttcgcgctctctcgctccctgccgccgcccgcagggctgcggggctcggtggcatctcccgggcgcggcccgcagtccttgcccctgcctccgggccgctcccgcccccggcgccgctcgctcccccgacccggactcccccatg

SEQ ID NO: 56 - DNA, 85 bp, Homo sapiens
  source 1..85: mol_type = other DNA
gtgcctctgtggccgcaggcgcaggcccgggcgacagccgagacgtggagcgcgccggctcgctgcagctccgggactcaacatg

SEQ ID NO: 57 - DNA, 71 bp, Homo sapiens
  source 1..71: mol_type = other DNA
gcttctctcgttccgtcgattgggaggagcggtggcgacctcggccttcagtgtttccgacggagtgaatg

SEQ ID NO: 58 - DNA, 234 bp, Homo sapiens
  source 1..234: mol_type = other DNA
atctctctcttctcctggcgctcgcgtgcgagagggaactagcgagaacgaggaagcagctggaggtgacgccgggcagattacgcctgtcagggccgagccgagcggatcgctgggcgctgtgcagaggaaaggcgggagtgcccggctcgctgtcgcagagccgagcctgtttctgcgccggaccagtcgaggactctggacagtagaggccccgggacgaccgagctgatg

SEQ ID NO: 59 - DNA, 67 bp, Homo sapiens
  source 1..67: mol_type = other DNA
aattctcctggcggcctccgttcagacgcggcagctgtgacccacctgcctcctccgcagagcaatg

SEQ ID NO: 60 - DNA, 493 bp, Homo sapiens
  source 1..493: mol_type = other DNA
tcccctctttccccaacctcctccctctcttctactccacccctccgttttcccactccccactgactcggatgcctggatgttctgccaccgggcagtggtccagcgtgcagccgggagggggcaggggcagggggcactgtgacaggaagctgcgcgcacaagttggccatttcgagggcaaaataagttctcccttggatttggaaaggacaaagccagtaagctacctcttttgtgtcggatgaggaggaccaaccatgagccagagcccgggtgcaggctcaccgccgccgctgccaccgcggtcagctccagttcctgccaggagttgtcggtgcgaggaattttgtgacaggctctgttagtctgttcctcccttatttgaaggacaggccaaagatccagtttggaaatgagagaggactagcatgacacattggctccaccattgatatctcccagaggtacagaaacaggattcatgaagatg

SEQ ID NO: 61 - DNA, 864 bp, Homo sapiens
  source 1..864: mol_type = other DNA
ggttcctttggggtgatcaaagagggagacacagacacagagagacaaaggcaaggaggactgtctgggagccacgcgggcgatacagtttccgaggcacgccgcgtcccgcctagcctgttgaacaggtagacatgagcgacccaagctgcggatttgcgaggcgcgccctggagctgctagagatccggaagcacagccccgaggtgtgcgaagccaccaagtcaagttcctaacgagtcttcagaggaggcagcaggaagctcagagagctgcaaagcaaccgtgcccatctgtcaagacattcctgagaagaacatacaagaaagtcttcctcaaagaaaaaccagtcggagccgagtctatcttcacactttggcagagagtatttgcaaactgattttcccagagtttgaacggctgaatgttgcacttcagagaacattggcaaagcacaaaataaaagaaagcaggaaatctttggaaagagaagactttgaaaaaacaattgcagagcaagcagttgcagcaggagttccagtggaggttatcaaagaatctcttggtgaagaggtttttaaaatatgttacgaggaagatgaaaacatccttggggtggttggaggcacccttaaagattttttaaacagcttcagtacccttctgaaacagagcagccattgccaagaagcaggaaaaaggggcaggcttgaggacgcctccattctatgcctggataaggaggatgattttctacatgtttactacttcttccctaagagaaccacctccctgattcttcccggcatcataaaggcagctgctcacgtattatatgaaacggaagtggaagtgtcgttaatg

SEQ ID NO: 62 - DNA, 111 bp, Homo sapiens
  source 1..111: mol_type = other DNA
ggctccttccgctccgcgactgcgttaactggagccaggctgagcgtcggcgccggggttcggtggcctctagtgagatctggaggatccaaggattctgtagctacaatg

SEQ ID NO: 63 - DNA, 55 bp, Homo sapiens
  source 1..55: mol_type = other DNA
aggtctctgcggcgcggtcctcggagacacgcggcggtgtcctgtgttggccatg

SEQ ID NO: 64 - DNA, 140 bp, Homo sapiens
  source 1..140: mol_type = other DNA
acttcctttcccggcgtgcaccgcgaatccctcctcctcttctttacctctctccctcctcctcaggttctctatcgacgagtctggtagctgagcgttgggctgtaggtcgctgtgctgtgtgatcccccagagccatg

SEQ ID NO: 65 - DNA, 198 bp, Homo sapiens
  source 1..198: mol_type = other DNA
ccttctttaataagcaggagcgaaaaagacaaattccaaagaggattgttcagttcaagggaatgaagaattcagaataattttggtaaatggattccaatatggggaataagaataagctgaacagttgacctgctttgaagaaacatactgtccatttgtctaaaataatctataacaaccaaaccaatcaaaatg

SEQ ID NO: 66 - DNA, 49 bp, Homo sapiens
  source 1..49: mol_type = other DNA
cggcccctctgttgtcgtttggcagcggatagaggacacgaccaagatg

SEQ ID NO: 67 - DNA, 113 bp, Homo sapiens
  source 1..113: mol_type = other DNA
cttccctttcctgttaggcgagagctgcgaaaggcgagagctgcgaagggccaggtgtcgggcgctgtttctcgttttcatcatatagacaaaacagccctgctgcaaagatg

SEQ ID NO: 68 - DNA, 326 bp, Homo sapiens
  source 1..326: mol_type = other DNA
gcttcttctcacgccgggagcaggctcccgcctcgcaccgctgccccgcgagcagctcctcttctcccgaggcgcgcggggcgcccccgcgagccccgcggctgagaccccgcagcctggaggagggctgtccggggctttggatgctgctgctaggggtggtgggagcagccgtgggacgcgtggccgggagcgggggtgacagcctgggattccgggggcttctcttccttgtcctcctcctctcctctctattcccagtgtggccgtggctgacactaaagactttgtagccatcaacccgagtgcagtttcgatggaaaatg

SEQ ID NO: 69 - DNA, 342 bp, Homo sapiens
  source 1..342: mol_type = other DNA
ccgcctctttcattgaagaaatttaagttcgtgtggttttaccttttccgggagtctccagctggccctcatttgtgtccggagctcaggagttcccaaaccgactcagtcgcaccaagtttccgtcttttggaattggggaaggagtttctttctttcttttcttttttcttgagccagttttaatcgctttgaataaatactcccttaagtagttaaatataggaggagaaagaatacatcggttgttaaagcaggagaggaagagagacctgccctgtagcgtgactcctctagaaaaaaaaaaaaaaagccggagtattttactaagcccctaaaatg

SEQ ID NO: 70 - DNA, 186 bp, Homo sapiens
  source 1..186: mol_type = other DNA
cctcctcctgctcctgccttggctcctccgccgcgcgtctcgcactccgagagccgcagcggcagcggcgcgtcctgcctgcagagagccaggccggagaagccgagcggcgcagaggacgccagggcgcgcgccgcagccacccaccctccggaccgcggcagctgctgacccgccatcgccatg

SEQ ID NO: 71 - DNA, 214 bp, Homo sapiens
  source 1..214: mol_type = other DNA
ctgtctttatggaccagtaggcagagcgaaattgacgctgacaagacttttgcatcttggaagggactgtaatctactgtagtgaagaacagagcctctcaatcagacgggtgtaaataagagacggaggggagtccaaaagaaaaggaagaggaggaaaaacaagtgtgtgttggggggaacagggggaaaagcatttttggtggatggtatg

SEQ ID NO: 72 - DNA, 261 bp, Homo sapiens
  source 1..261: mol_type = other DNA
gctcctttaagcgtccacaggcggcggagcggccacaatcacagctccgggcattgggggaacccgagccggctgcgccgggggaatccgtgcgggcgccttccgtcccggtcccatcctcgccgcgctccagcacctctgaagttttgcagcgcccagaaaggaggcgaggaaggagggagtgtgtgagaggagggagcaaaaagctcaccctaaaacatttatttcaaggagaaaagaaaaagggggggcgcaaaaatg

SEQ ID NO: 73 - DNA, 97 bp, Homo sapiens
  source 1..97: mol_type = other DNA
ttttctctttcaaactgcccagacggttggacaggacgtagacacacagaagaaaagaagacaaagaacgggtaggaaaattaaaaaggttaccatg

SEQ ID NO: 74 - DNA, 97 bp, Homo sapiens
  source 1..97: mol_type = other DNA
cagcctcttttgccggtattcagtgaagaaagcaagtctaaatatgcagttctctcactggagtgaaagatgttttgttcatttctaatcaactatg

SEQ ID NO: 75 - DNA, 472 bp, Homo sapiens
  source 1..472: mol_type = other DNA
ccgcctctcggcgagcccgccctcttctgaagaggcgtttctggaccactgagccccgcctcccactgtgagcggaaccctaccgtttttaaaaaaatctttttcaaaacttgccaggttgtctttccaaatatttttaataatagtgctgctgctgtagaccacagagaaaagaatccctcgctcttccttttcacttagtagaaacttctaccgcgtaggtcccgccaggagttcgcgcatgcgcaggagcgacaataagatggcggtgataatcgccgcactttttttcaaattagtggatcccagaaatcattgcgcgcatttgtaacgaatttccgttcgagtttgtattttaggcgccattttcgagtgaaggacccggagccgaaacaccggtaggagcggggaggtgggtactacacaaccgtctccagccttggtctgagtggactgtcctgcagcgaccatg

SEQ ID NO: 76 - DNA, 79 bp, Homo sapiens
  source 1..79: mol_type = other DNA
tggccttcccggcggctgattcgagggcttgtttggtcagaaggggggcgtcagagaagctgccccttagccaaccatg

SEQ ID NO: 77 - DNA, 141 bp, Homo sapiens
  source 1..141: mol_type = other DNA
gagtctttcggcctgggtggaggacgcggctgcttcaagtccttggctctgatccaggccacagattccaggattctacaggcaggaaacatcttagaaatcagggttgggcaggcaggagccaggagagtagctacaatg

SEQ ID NO: 78 - DNA, 217 bp, Homo sapiens
  source 1..217: mol_type = other DNA
tatccttttttactgcagatttactttaaggctcatattctccaagtctattctgctttaaaaagaagacaagaaaagaagtggtttatcaaaatcacgttataatcagattttgaccaagcattttgtaagtatacaaatgtcagccaatgacatataacaaccatttcttataaaaccttgatgttcaaaagcctgactagcagtggcatccatg

SEQ ID NO: 79 - DNA, 181 bp, Homo sapiens
  source 1..181: mol_type = other DNA
tgctcttttcgatccgggacggccggtcaggctcgccgccgagctggagaactacgatgacccgcacaaaacccctgcctccccagttgtccacatcaggggcctgattgacggtgtggtggaagcagaccttgtggaggccttgcaggagtttggacccatcagctatgtggtggtaatg

SEQ ID NO: 80 - DNA, 303 bp, Homo sapiens
  source 1..303: mol_type = other DNA
cattcttccgggtccagaaggtgatctccgcccgtgctcagaatccaggggcccggggctgtagattccttgacaaggatatcctagcggcgaaacaacaccgtactgggagtcagaacgtctgggttctagtcttgactgccattaactagcggtatgacattggagaagcttttttgacccttctggatttccgtttccttttctgtaaaatgaggagcttggaagatccggaaaatgaggcccataggaaacaagtgacttgctgagtccagataacactgactgtcagagagaaacatg

SEQ ID NO: 81 - DNA, 289 bp, Homo sapiens
  source 1..289: mol_type = other DNA
tggcctcctcttgccacgaggtcagacggcgagttcttagagaaaaaggctgcttagctgctgcttatcatgtaacctcaaaaggaaactgatcgtctttctcatgctgtcacgtacttgggttattatcgctgattacagctggaaacaattgatttgctcttacgtatttgtgtgacttgactcttcaaacacaaaggttaacaggaagatctcgagggccctggctgaacttcaccttttggctttcttggcctgatgctgaactctcgaggttgagccccatatg

SEQ ID NO: 82 - DNA, 172 bp, Homo sapiens
  source 1..172: mol_type = other DNA
atccctccccggactccggctccggctccgattgcaatttgcaacctccgctgccgtcgccgcagcagccaccaattcgccagcggttcaggtggctcttgcctcgatgtcctagcctaggggcccccgggccggacttggctgggctcccttcaccctctgcggagtcatg

SEQ ID NO: 83 - DNA, 24 bp, Homo sapiens
  source 1..24: mol_type = other DNA
ccgcctcctcgggagagataaatg

SEQ ID NO: 84 - DNA, 221 bp, Homo sapiens
  source 1..221: mol_type = other DNA
gcgcccctttgtgcgtcacgggtggcgggcgcgggaaggggatttggattgttgcgcctctgctctgaagaaagtgctgtctggctccaactccagttctttcccctgagcagcgcctggaacctaacccttcccactctgtcaccttctcgatcccgccggcgctttagagccgcagtccagtcttggatccttcagagcctcagccactagctgcgatg

SEQ ID NO: 85 - DNA, 222 bp, Homo sapiens
  source 1..222: mol_type = other DNA
gcgtcttttcccccagccccgctccaccagatccgcgggagccccactgctctccgggtccttggcttgtggctgtgggtcccatcgggcccgccctcgcacgtcactccgggacccccgcggcctccgcaggttctgcgctccaggccggagtcagagactccaggatcggttctttcatcttcgccgcccctgcgcgtccagctcttctaagacgagatg

SEQ ID NO: 86 - DNA, 143 bp, Homo sapiens
  source 1..143: mol_type = other DNA
aaccctttctgcagagtcccggcagtgcgggactccggtagccgcccctccggtagccgcccctcctgcccccgcgccgccgccctatatgttgcccgccgcggcctctggggcatggagcacgctgcccagccctggcgatg

SEQ ID NO: 87 - DNA, 99 bp, Homo sapiens
  source 1..99: mol_type = other DNA
gttcccttttctacctgcagagcacggttcccataagggcggcgagatcagcctcctgtctcatctggaagaccaccactctggggtctcagaggaatg

SEQ ID NO: 88 - DNA, 50 bp, Homo sapiens
  source 1..50: mol_type = other DNA
ctatctctgtgtgtccgcgtgtgcgcccggtccccgcctgccgcaccatg

SEQ ID NO: 89 - DNA, 310 bp, Homo sapiens
  source 1..310: mol_type = other DNA
cctcctcctccagctcttcctgtcccgctgttgcaacactgcctcactcttcccctcccaccttctctcccctcctctctgctttaattttctcagaattctctggactgaggctccagttctggcctttggggttcaagatcactgggaccaggccgtgatctctatgcccgagtctcaaccctcaactgtcaccccaaggcacttgggacgtcctggacagaccgagtcccgggaagccccagcactgccgctgccacactgccctgagcccaaatgggggagtgagaggccatagctgtctggcatg

SEQ ID NO: 90 - DNA, 84 bp, Homo sapiens
  source 1..84: mol_type = other DNA
aggtctctgcgcagcccagcccgccggtccacgccgcgcaccgctccgagggccagcgccacccgctccgcagccggcaccatg

SEQ ID NO: 91 - DNA, 50 bp, Homo sapiens
  source 1..50: mol_type = other DNA
tcgcctttgccgatccgccgcccgtccacacccgccgccagctcaccatg

SEQ ID NO: 92 - DNA, 107 bp, Homo sapiens
  source 1..107: mol_type = other DNA
ggctccttcttcctctgcatgtggctggcggccgcagagcagttcagttcgctcactcctcgccggccgcctctccttcgggctctcctcgcgtcactggagccatg

SEQ ID NO: 93 - DNA, 52 bp, Homo sapiens
  source 1..52: mol_type = other DNA
cgttctctgcctggcctgaggctccctgagccgcctccccaccatcaccatg

SEQ ID NO: 94 - DNA, 160 bp, Homo sapiens
  source 1..160: mol_type = other DNA
gcctcctttctttctcagcccagacctggccctctggagagggttttggagtcctgggtaggcagggtacctcaggcagcaggcagcacaccttggatgtgagctgaatggattttcaaatttcacagaaggagcctccatgctggagaaagtatgtatg

SEQ ID NO: 95 - DNA, 126 bp, Homo sapiens
  source 1..126: mol_type = other DNA
cggcctccctttagctgccatcttgcgtccccgcgtgtgtgcgcctaatctcaggtggtccacccgagaccccttgagcaccaaccctagtcccccgcgcggccccttattcgctccgacaagatg

SEQ ID NO: 96 - DNA, 43 bp, Homo sapiens
  source 1..43: mol_type = other DNA
ttgtcctttgcatctgcacgtgttcgcagtcgtttccgcgatg

SEQ ID NO: 97 - DNA, 485 bp, Homo sapiens
  source 1..485: mol_type = other DNA
tttcctttcttaatatggcgatgagctcttaggccagtgtggggaccggggctgaggtgccctggacactggaggagggggagggaaggagcccctgggagcctggggtagaagtgtaggaggtgggaggattccggcccgcatggagctgtcctggcctcagaaggttatccgtctctcctgccaaccatggagacatatttagacaggaccaggtggggactgaggggtgccaatttcagggggcagctccggttccctccccgccccctgctcctattcctccacctgaccctttttcccttggctctgtcggcagtttctccaggacccagcagtgccctctgtccactgctctgggccattccccaatcccccctcccacttgagcccctaactcagaatctgggacccaggggcccctccctaccccagctaacctcttctggaccaggagagccaacccagatcccactacctccatg

SEQ ID NO: 98 - DNA, 92 bp, Homo sapiens
  source 1..92: mol_type = other DNA
gtctctctgcccctctctgccccaagtattttcagccccagccggccacacagctcggatctcctcctgtggatccccccagctctgcgatg

SEQ ID NO: 99 - DNA, 235 bp, Homo sapiens
  source 1..235: mol_type = other DNA
aggtctttggctttttttggcggagctggggcgccctccggaagcgtttccaactttccagaagtttctcgggacgggcaggagggggtggggactgccatatatagatcccgggagcaggggagcgggctaagagtagaatcgtgtcgcggctcgagagcgagagtcacgtcccggcgctagcccagcccgacccaggcccaccgtggtgcacgcaaaccacttcctggccatg

SEQ ID NO: 100 - DNA, 92 bp, Homo sapiens
  source 1..92: mol_type = other DNA
tttcctcctttccaagagagggctgagggagcagggttgagcaactggtgcagacagcctagctggactttgggtgaggcggttcagccatg

SEQ ID NO: 101 - DNA, 97 bp, Homo sapiens
  source 1..97: mol_type = other DNA
gggtccctttctgtcccctgagcaccgtcgcctcctttcctccagggctccgtaggcaccaactgcaaggacccctccccctgcgggcgctcccatg

SEQ ID NO: 102 - DNA, 98 bp, Homo sapiens
  source 1..98: mol_type = other DNA
gagcctctcctcaaagcctggctcccacggaaaatatgctcagtgcagccgcgtgcatgaatgaaaacgccgccgggcgcttctagtcggacaaaatg

SEQ ID NO: 103 - DNA, 380 bp, Homo sapiens
  source 1..380: mol_type = other DNA
cgctcccttcgtttccgtctcggccgggcacccgagcgcatcccgccgaggccgggccgtttcagggggaggcgccaactcatcgcggcgccgggcccctgaccgtgcagtaaccgctacccaggaggcggagcggacaaggctccggcctgcgaggagtcacattaactttgctctagaagacaactttacaaggatctaaaaggaacaggattaaagatgactgaatactgggttccagaaatttaaaacaatcagcttagcaaatcatatattcttctgtggagctgagaattgatgtccgctcttccccgtgatttggaactttccaatcccagagaaaagttgacaaagggactgcccaggactgagtccatatg

SEQ ID NO: 104 - DNA, 94 bp, Homo sapiens
  source 1..94: mol_type = other DNA
ccccccctcactcgcgcgttaggaggctcgggtcgttgtggtgcgctgtcttcccgcttgcgtcagggacctgcccgactcagtggccgccatg

SEQ ID NO: 105 - DNA, 211 bp, Homo sapiens
  source 1..211: mol_type = other DNA
cctcctctcctctccctctcctctcctgctatagagggctccgacagcagttcccagccagcgtgttcagcctgcctgcctgcctgcctctgtgtgtgtgtgagcgtgtgtgcgtgcgtctactttgtactgggaagaacacagcccatgtgctctgcatggacgttactgatactctgtttagcttgattttcgaaaagcaggcaagatg

SEQ ID NO: 106 - DNA, 87 bp, Homo sapiens
  source 1..87: mol_type = other DNA
ctgcctcttccagggcgggcggtgtggtgcacgcattgctgtgctccaactccctcagggcctgtgttgccgcactctgctgctatg

SEQ ID NO: 107 - DNA, 243 bp, Homo sapiens
  source 1..243: mol_type = other DNA
cctcctccttctcccgccctcctcgccgatccgggcggtgctggcagccggagcggcggcgggcgggccgagcagccggggcagccgcgcgtgggcatccacgggcgccgagcctccgtccgtgtctctatccctcccgggcctttgtcagcgcgcccgctgggagcggggccgagagcgccggttccagtcagacagccccgcaggtcagcggccgggccgagggcgccagagggggccatg

SEQ ID NO: 108 - DNA, 506 bp, Homo sapiens
  source 1..506: mol_type = other DNA
ttgcctttggctgggtgcaacttccattttaggtgttggatctgagggggaaaaaaaagagagagggagagagagagaaagaagagcaggaaagatcccgaaaggaggaagaggtggcgaaaaatcaactgccctgctggatttgtctttctcagcaccttggcgaagccttgggtttctttcttaaaggactgatttttagaactccacatttgaggtgtgtggcttttgaagaaaatgtatgtactgacgggaaaaggaggataagcaagtcgaatttttgtcttacgctctctccttcctgcttcctccttgctgtggtggctgggatgcttcttccatgattttttgaatctagactgggctgttctctgtgttaaaccaatcagttgcgaccttctcttaacagtgtgaagtgagggggtctctctccctccttctccttcctctgtgattcaccttcctttttaccctgccctgcggcggctccgccccttaccttcatg

SEQ ID NO: 109 - DNA, 528 bp, Homo sapiens
  source 1..528: mol_type = other DNA
ccgtcccctccagcccagctcgggctccagctccagcgccggcgcttcagctgcgaccgcgagccctctcaagcaagatataacttccccaagtcacacagtggtatcagagctaagaatgggacccagatatgactgatctagttctgttccaaaaccgtgctgtattatattaacgcctaccctctgaagaggtccaagcaacggaagtactactacgaagctgcctttctggccatccttgagaaaaatagacagatgagttcctgccagtgagtccctaggcctccatctctctcccttgctgtaccaccttcaccaccatccatgcgaccccaagagccttaatgactctagaagagactccaggcaggggaagctgaaaggacctttcactccctacttttggccagggccttctgtgccacctgccaagaccagcaggcctaccctctgaagaggtccaagcaacggaagtactactacgaagctgcctttctggccatccttgagaaaaatagacagatg

SEQ ID NO: 110 - DNA, 163 bp, Homo sapiens
  source 1..163: mol_type = other DNA
cgatctttctggagccgcacctccacgcggagtccgagcgcgtgtgctgagaccccagggtcgggagggcggagactgggagggagggagaagcccctttggcctgccttacggaagcctgcgagggagggtggtgtccactgcccagttccgtgtcccgatg

SEQ ID NO: 111 - DNA, 175 bp, Homo sapiens
  source 1..175: mol_type = other DNA
agttcttctcgatcgtgtcagtttgtaaggcgagggcggaagttggattcctggcctgagaatattaggcgtagttttccagtttttggcaaagcggaaatacttaaggcccctgggttgactgggttctttgttttatctaccggcttctgctttacgacaggtcacaaacatg

SEQ ID NO: 112 - DNA, 97 bp, Homo sapiens
  source 1..97: mol_type = other DNA
tttcctccccatcctgtcgcggctcgaaaggaatggaaaatggcggcctagacgcggagtttcctgcccgacccgcggcggctccggcggcgccatg

SEQ ID NO: 113 - DNA, 247 bp, Homo sapiens
  source 1..247: mol_type = other DNA
ctctctcttttttttccgccctagctggggctgtgttggaggagaggaagaaagagagacagaggattgcattcatccgttacgttcttgaaatttcctaatagcaagaccagcgaagcggttgcacccttttcaatcttgcaaaggaaaaaaacaaaacaaaacaaaaaaaacccaagtccccttcccggcagtttttgccttaaagctgccctcttgaaattaattttttcccaggagagagatg

SEQ ID NO: 114 - DNA, 107 bp, Homo sapiens
  source 1..107: mol_type = other DNA
tgttctctttggcttccgggcgcacgctactctgtcgccgccgtcagaccggaattgccggtgccgccgccaccgctgtctgtgcgcccacctctgctgctaccatg

SEQ ID NO: 115 - DNA, 70 bp, Homo sapiens
  source 1..70: mol_type = other DNA
cgttctttttcgcaacgggtttgccgccagaacacaggtgtcgtgaaaactacccctaaaagccaaaatg

SEQ ID NO: 116 - DNA, 89 bp, Homo sapiens
  source 1..89: mol_type = other DNA
tctcctctttccccctcccttctctcccgggcggcttactttgcggcagcgccgagaaccccaccccctttctttgcggaatcaccatg

SEQ ID NO: 117 - DNA, 31 bp, Homo sapiens
  source 1..31: mol_type = other DNA
atttccttcctcttttggcaacatggcgggc

SEQ ID NO: 118 - DNA, 35 bp, Homo sapiens
  source 1..35: mol_type = other DNA
gggtcttttgcgttctctttccctctcccaacatg

SEQ ID NO: 119 - DNA, 40 bp, Homo sapiens
  source 1..40: mol_type = other DNA
tattcttttgaagattcttcgttgtcaagccgccaaagtg

SEQ ID NO: 120 - DNA, 141 bp, Homo sapiens
  source 1..141: mol_type = other DNA
cttcccctcagtgcggtcacatacttccagaagagcggaccagggctgctgccagcacctgccactcagagcgcctctgtcgctgggacccttcagaactctctttgctcacaagttaccaaaaaaaaaagagccaacatg

SEQ ID NO: 121 - DNA, 86 bp, Homo sapiens
  source 1..86: mol_type = other DNA
cgctcttttccacgtgcgaaagccccggactcgtggagttgtgaacgccgcggactccggagccgcacaaaccagggctcgccatg

SEQ ID NO: 122 - DNA, 311 bp, Homo sapiens
  source 1..311: mol_type = other DNA
ctgtcccttgctccaggcgctcactttgcgggcggcactttttccaggttgttaatccagctaatggagaaggatagatgcacgctacttggtttagaaaaaaaaacaaaaatgagcaaacgagacgccccttccgttttatgataactaagctgcagggaaataaatcggctggccctactgcaatctactgcactcgagaaacatcacagaaaattctttgatttatcttaatagtgacaagtgagcctgcttctgtcaattactgaagctataaggagattttttaaaaattaaacttcaacacaatg

SEQ ID NO: 123 - DNA, 212 bp, Homo sapiens
  source 1..212: mol_type = other DNA
ccgcctctgttcaggacactgggtccccttggagcctccccaggcttaatgattgtccagaaggcggctataaagggagcctgggaggctgggtggaggagggagcagaaaaaacccaactcagcagatctgggaactgtgagagcggcaagcaggaactgtggtcagaggctgtgcgtcttggctggtagggcctgctcttttctaccatg

SEQ ID NO: 124 - DNA, 219 bp, Homo sapiens
  source 1..219: mol_type = other DNA
agccctcccctcctcgctccctcccctcctctccccgcccagttcttctcttcccgtctgaggtggcggtcggtctcgccttgtcgccagctccattttcctctctttctcttcccctttccttcgcgcccaagagcgcctcccagcctcgtagggtggtcacggagcccctgcgccttttccttgctcgggtcctgcgtccgcgcctgccccgccatg

SEQ ID NO: 125 - DNA, 30 bp, Homo sapiens
  source 1..30: mol_type = other DNA
cacccttcttaaagcggcggcgggaagatg

SEQ ID NO: 126 - DNA, 190 bp, Homo sapiens
  source 1..190: mol_type = other DNA
ggccctccctgcacggcctcccgtgcgcccctgtcagactgtggcggccggtcgcgcggtgcgctctccctccctgcccgcagcctggagaggcgcttcgtgctgcacacccccgcgttcctgccggcaccgcgcctgccctctgccgcgctccgccctgccgccgaccgcacgcccgccgcgggacatg

SEQ ID NO: 127 - DNA, 246 bp, Homo sapiens
  source 1..246: mol_type = other DNA
ggccccctcctcgcgagttggtgccgctgccacctccgattccgagctttcggcacctctgccgggtggtaccgagccttcccggcgccccctcctctcctcccaccggcctgcccttccccgcgggactatcgcccccacgtttccctcagcccttttctctcccggccgagccgcggcggcagcagcagcagcagcagcagcaggaggaggagcccggtggcggcggtggccggggagcccatg

SEQ ID NO: 128 - DNA, 304 bp, Homo sapiens
  source 1..304: mol_type = other DNA
gggccttcccggctgacggcctgcgtgcactgcgcttgcgcgggttgagggcggtggctcaggctcctggaaaggaccgtccacccctccgcgctggcggtgtggacgcggaactcagcggagaaacgcgattgagagcagtgtgtggattacactatcactggaaaaatacgaattgagaagaaggaaaagactggaagatgcagaccttggttcctgttagtggaaacactgtaaggtcccagaaatggaaaagaaaatgaaataaatcagcagttatgaggcagagcctaagagaactatg

SEQ ID NO: 129 - DNA, 20 bp, Homo sapiens
  source 1..20: mol_type = other DNA
gttcctctctccccaagatg

SEQ ID NO: 130 - DNA, 23 bp, Homo sapiens
  source 1..23: mol_type = other DNA
actcccttttctttggcaagatg

SEQ ID NO: 131 - DNA, 515 bp, Homo sapiens
  source 1..515: mol_type = other DNA
gtccctctactcagagcagcccggagaccgctgccgccgctgccgctgctaccaccgctgccacctgaggagacccgccgcccccccgtcgccgcctcctgcgagtccttcttagcacctggcgtttcatgcacattgccactgccattattattatcattccaatacaaggaaaataaaagaagataccagcgaaaagaaccgcttacacctttccgaattactcaagtgtctcctggaaacagagggtcgttgtccccggaggagcagccgaagggcccgtgggctggtgttgaccgggagggaggaggagttgggggcattgcgtggtggaaagttgcgtgcggcagagaaccgaaggtgcagcgccacagcccaggggacggtgtgtctgggagaagacgctgcccctgcgtcgggacccgccagcgcgcgggcaccgcggggcccgggacgacgccccctcctgcggcgtggactccgtcagtggcccaccaagaaggaggaggaatatg

SEQ ID NO: 132 - DNA, 305 bp, Homo sapiens
  source 1..305: mol_type = other DNA
ttttctttatcctgcagtctttacctcagcagaaccgcacaccacagactccctccagctctttgtgtgtggctctctcagggtccaacaagagcaagctgtgggtctgtgagtgtttatgtgtgcttttattcacttcacacttattgaaaagtgtgtatgtgagagggtggggtgtgtgtgtcaaagagagtgaggaagagaaggagagagagatcaattgattctgcagcctcagctccagcatccctcagttgggagcttccaaagccgggtgatcacttggggtgcatagctcggagatg

SEQ ID NO: 133 - DNA, 151 bp, Homo sapiens
  source 1..151: mol_type = other DNA
ccgccccttacccggcgtgccccgcgcccggaggcgctgacgtggccgccgtcagagccgccatcttgtgggagcaaaaccaacgcctggctcggagcagcagcctctgaggtgtccctggccagtgtccttccacctgtccacaagcatg

SEQ ID NO: 134 - DNA, 569 bp, Homo sapiens
  source 1..569: mol_type = other DNA
gcgccttttccggcagcggcggcggcagaactgggaggaggagttggaggccggagggagcccgcgctcggggcggcggctggaggcagcgcaccgagttcccgcgaggatccatgacctgacggggccccggagccgcgctgcctctcgggtgtcctgggtcggtggggagcccagtgctcgcaggccggcgggcgggccggagggctgcagtctccctcgcggtgagaggaaggcggaggagcgggaaccgcggcggcgctcgcgcggcgcctgcggggggaagggcagttccgggccgggccgcgcctcagcagggcggcggctcccagcgcagtctcagggcccgggtggcggcggcgactggagaaatcaagttgtgcggtcggtgatgcccgagtgagcggggggcctgggcctctgcccttaggaggcaactcccacgcaggccgcaaaggcgctctcgcggccgagaggcttcgtttcggtttcgcggcggcggcggcgttgttggctgaggggacccgggacacctgaatgcccccggccccggctcctccgacgcgatg

SEQ ID NO: 135 - DNA, 187 bp, Homo sapiens
  source 1..187: mol_type = other DNA
cgccctcccgccgccgcccgccctcgctctctcgcgctaccctcccgccgcccgcggtcctccgtcggttctctcgttagtccacggtctggtcttcagctacccgccttcgtctccgagtttgcgactcgcggaccggcgtccccggcgcgaagaggctggactcggattcgttgcctgagcaatg

SEQ ID NO: 136 - DNA, 152 bp, Homo sapiens
  source 1..152: mol_type = other DNA
cggcctcccgctctcacttccttctcgagcccggagccgctgccgccgcccccagctcccccgcctcggggagggcaccaggtcactgcagccagaggggtccagaagagagaggaggcactgcctccactacagcaactgcacccacgatg

SEQ ID NO: 137 - DNA, 46 bp, Homo sapiens
  source 1..46: mol_type = other DNA
ctctcttcccactcgggtttgacctacagccgcccgggagaagatg

SEQ ID NO: 138 - DNA, 194 bp, Homo sapiens
  source 1..194: mol_type = other DNA
ccacctctgtctgctgccggcagaaagccacaagccatgaaaactgattgagatgagaagaattcatctgggactggcttttgctttaggatggtgttggaagttgctcgttgtcgctaggagcctgctccactgtaagggtgtcaggatctgaagagctatggtgaaacaccactgaagcattgccaaggatg

SEQ ID NO: 139 - DNA, 323 bp, Homo sapiens
  source 1..323: mol_type = other DNA
gcatctcttcgcctctcggagctggaaatgcagctattgagatcttcgaatgctgcggagctggaggcggaggcagctggggaggtccgagcgatgtgaccaggccgccatcgctcgtctcttcctctctcctgccgcctcctgtctcgaaaataacttttttagtctaaagaaagaaagacaaaagtagtcgtccgcccctcacgccctctcttcctctcagccttccgcccggtgaggaagcccggggtggctgctccgccgtcggggccgcgccgccgagccccagccgccccgggccgcccccgcacgccgcccccatg

SEQ ID NO: 140 - DNA, 80 bp, Homo sapiens
  source 1..80: mol_type = other DNA
cggcctctagtcatcgccctcgcagcggcggccaacatcaccgccactgccacccctcccagactgtggacgggaggatg

SEQ ID NO: 141 - DNA, 131 bp, Homo sapiens
  source 1..131: mol_type = other DNA
aggcctcttggttctgcggcacgtgacggtcgggccgcctccgcctctctctttactgcggcgcggggcaaggtgtgcgggcgggaaggggcacgggcacccccgcggtccccgggaggctagagatcatg

SEQ ID NO: 142 - DNA, 42 bp, Homo sapiens
  source 1..42: mol_type = other DNA
cgacctttctctgcgcagtacggccgccgggaccgcagcatg

SEQ ID NO: 143 - DNA, 108 bp, Homo sapiens
  source 1..108: mol_type = other DNA
gcgcctttttttccccccatacaatacaagatcttccttcctcagttcccttaaagcacagcccagggaaacctcctcacagttttcatccagccacgggccagcatg

SEQ ID NO: 144 - DNA, 220 bp, Homo sapiens
  source 1..220: mol_type = other DNA
cgacctctttgcagctcgcacagctaagggcgagggcgcccttcggcagaagcagcaaaccgccggcaagcccagcgaggagggctgccggggtctgggcttgggaattggctggcacccagcggaaagggacgtgagctgagcggcgggggagaagagtgcgcaggtcagagggcggcgcgcagcggcgctccgcgaggtccccacgccgggcgatatg

SEQ ID NO: 145 - DNA, 84 bp, Homo sapiens
  source 1..84: mol_type = other DNA
tctccttttgctctcagatgctgccagggtccctgaagagggaagacacgcggaaacaggcttgcacccagacacgacaccatg

SEQ ID NO: 146 - DNA, 142 bp, Homo sapiens
  source 1..142: mol_type = other DNA
cttcctcttttggggttcttcctttctctctcagctctccgtctctctttctctctcagcctctttctttctccctgtctcccccactgtcagcacctcttctgtgtggtgagtggaccgcttaccccactaggtgaagatg

SEQ ID NO: 147 - DNA, 70 bp, Homo sapiens
  source 1..70: mol_type = other DNA
gcctctctcttgctgcctagcctcctgccggcctcatcttcgcccagccaaccccgcctggagccctatg

SEQ ID NO: 148 - DNA, 66 bp, Homo sapiens
  source 1..66: mol_type = other DNA
cggcctttttctagccaggctctcaactgtctcctgcgttgctgggaagttctggaaggaagcatg

SEQ ID NO: 149 - DNA, 37 bp, Homo sapiens
  source 1..37: mol_type = other DNA
cttcctttccgcacaggggccgccgagcggggccatg

SEQ ID NO: 150 - DNA, 502 bp, Homo sapiens
  source 1..502: mol_type = other DNA
ttccccttccgtgggtcagggccggtccggtccggaacctgcagcccctttcccagtgttctagttcgcccgtgacccggaataatgagcaaggagggtgtggtgggttgaaagccatcctactttactcccgagttagagcatggattcagttttagtcttaagggggaagtgagattggagatttttatttttaattttgggcagaagcaggttgactctagggatctccagagcgagaggatttaacttcatgttgctcccgtgtttgaaggaggacaataaaagtcccaccgggcaaaattttcgtaacctctgcggtagaaaacgtcaggtatcttttaaatcgcgatagttttcgctgtgtcaggctttcttcggtggagctccgagggtagctaggttctaggtttgaaacagatgcagaatccaaaggcagcgcaaaaaacagccaccgattttgctatgtctctgagctgcgagataatcagacagctaaatg

SEQ ID NO: 151 - DNA, 502 bp, Homo sapiens; identical to SEQ ID NO: 150
  source 1..502: mol_type = other DNA

SEQ ID NO: 152 - DNA, 153 bp, Homo sapiens
  source 1..153: mol_type = other DNA
ctacccttttccgctccacggtgacctccgtgcggccgggtgcgggcggagtcttcctcgatcccgtggtgctccgcggcgcggccttgctctcttccggtcgcgggacaccgggtgtagagggcggtcgcggcgggcagtggcggcagaatg

SEQ ID NO: 153 - DNA, 122 bp, Homo sapiens
  source 1..122: mol_type = other DNA
ctttcttttcagtccttgcgcaccggggaacaaggtcgtgaaaaaaaaggtcttggtgaggtgccgccatttcatctgtcctcattctctgcgcctttcgcagagcttccagcagcggtatg

SEQ ID NO: 154 - DNA, 235 bp, Homo sapiens
  source 1..235: mol_type = other DNA
cagccttttcctccaggggtgctttgtaaacacggctgtgctcagggctcgcgggtgaccgaaaggatcatgaactagtgacctggaaagggtactagatggaaacttgagaaaggactgcttattgataacagctaaggtattcctggaagcagagtaaataaagctcatggcccaccagctagaaagtattcttgccatgagaaaaagaatgtgataagttattcaacttatg

SEQ ID NO: 155 - DNA, 488 bp, Homo sapiens
  source 1..488: mol_type = other DNA
agatccctttcccagagtgctctgcgccgtgaagaagcggctcccggggactgggggcattttgtgttggctggagctggagtaacaagatggcgtcgtccgcggagtgacaggggtccctctgggccggagccggcggcagtggtggcagcggtatcgccgccctagctcaccgcgccccttttccagcccgcgacgtcgccgcgcaagcgaggcagcggcggccgccgagaaacaagtggcccagcctggtaaccgccgagaagcccttcacaaactgcggcctggcaaaaagaaacctgactgagcggcggtgatcaggttcccctctgctgattctgggccccgaaccccggtaaaggcctccgtgttccgtttcctgccgccctcctccgtagccttgcctagtgtaggagccccgaggcctccgtcctcttcccagaggtgtcggggcttggccccagcctccatcttcgtctctcaggatg

SEQ ID NO: 156 - DNA, 217 bp, Homo sapiens
  source 1..217: mol_type = other DNA
aagcctctcggtctgtggcagcagcgttggcccggccccgggagcggagagcgaggggaggcggagacggaggaaggtctgaggagcagcttcagtccccgccgagccgccaccgcaggtcgaggacggtcggactcccgcggcgggaggagcctgttcccctgagggtatttgaagtataccatacaactgttttgaaaatccagcgtggacaatg

SEQ ID NO: 157 - DNA, 93 bp, Homo sapiens
  source 1..93: mol_type = other DNA
ccgcctcctcccccgacttccttccctgagcacggcggcggcggggacgagcaccggcctgcgcgcggagccggcaccggatgacccaacatg

SEQ ID NO: 158 - DNA, 73 bp, Homo sapiens
  source 1..73: mol_type = other DNA
ctgtcttttcgcttgtgtccctctttctagtgtcgcgctcgagtcccgacgggccgctccaagcctcgacatg

SEQ ID NO: 159 - DNA, 91 bp, Homo sapiens
  source 1..91: mol_type = other DNA
ctgtctcccctcgccgcatccactctccggccggccgcctgcccgccgcctcctccgtgcgcccgccagcctcgcccgcgccgtcaccatg

SEQ ID NO: 160 - DNA, 118 bp, Homo sapiens
  source 1..118: mol_type = other DNA
cgttccctacttcctgtgctcttgcggagacgcgcgcgtcggggtttaacgcgtttctgggccgccgtaagcccggcctaggggcagctttgactcgagagccggctataggcgcatg

SEQ ID NO: 161 - DNA, 313 bp, Homo sapiens
  source 1..313: mol_type = other DNA
caccctttcggatgcctcccctagaaccctaccactttccacccctttccgtctgttatttctcccaaacttgcgcccgcacaggcccctctggaacactcctgccccgtagtgcccctcgtccccgctccgtagagaaagagcgtgcgtgccgcgcatttctggcctggggagcgggtggagtaaacctgcgggaaccattttacgacaacgtgcggctgtgcggtgtggctgacggcaacgccgctgctcttggagaggtcactccggagacggcgttggttttggggtgtggggggttggtggcactatg

SEQ ID NO: 162 - DNA, 711 bp, Homo sapiens
  source 1..711: mol_type = other DNA
ccttccctggcatctggagggaccaccgttgccgcgtcttcggcttccacgatctgcgttcgggctacgcggccacggcggcagccactgcgactcccactgtgcctggctctgtccatattagttcccaggcggccgtcgccgttccagcagcggcagcggcagcggcagcggcggacatgttgtgaggcggcggcgcgggtgtctgaaggatggtttggccgaggcggcggcaacggctgctggcggcggcggcagcggcagcggggcctcgggctctatagagccgagcccgctgggtacccgcccggtaccgcggcgaggccagtgcccctggatcttgcctctgctccgacgccgttggggaccagttaggcgacagcgcccgcccctctgaggagacacgaaggtggttccccagccgctcaaatttccggaccaccgcgctttcccctcctcagcctgggctgtgctctctctagaatcctcgggcccccactttcttcccaaactcatcctaaatctctcacacacgcgagtgttcccagccctcaagccagctgctcctccgttcattttctgcaccctcttcgcaaagcaccccccgggatcactctccgagggcgactttttgagaaatctcggtggagtagtggaccagagctggggagtttttaaaagccggggcgcgagaaacaggaaggtactatg

SEQ ID NO: 163 - DNA, 388 bp, Homo sapiens
  source 1..388: mol_type = other DNA
ttttctttttcgtgcgagccctcgcgcgcgcgtacagtcatcccgctggtctgacgattgtggagaggcggtggagaggcttcatccatcccacccggtcgtcgccggggattggggtcccagcgagacctccccgggagaagcagtgcccaggaggttttctgaagccggggaagctgtgcagccgaagccgccgccgcgccggagcccgggacaccggccaccctccgcgccacccaccctcgccggctccggcttcctctggcccaggcgccgcgcggacccggcagctgtctgcgcacgccgagctccacggtgaaaaaaaagtgaaggtgtaaaagcagcacaagtgcaataagagatatttcctcaaatttgcctcaagatg

SEQ ID NO: 164 - DNA, 104 bp, Homo sapiens
  source 1..104: mol_type = other DNA
cagtccctctggctgagacctcggctccggaatcactgcagcccccctcgccctgagccagagcaccccgggtcccgccagcccctcacactcccagcaaaatg

SEQ ID NO: 165 - DNA, 90 bp, Homo sapiens
  source 1..90: mol_type = other DNA
cgttctcttccgccgtcgtcgccgccatcctcggcgcgactcgcttctttcggttctacctgggagaatccaccgccatccgccaccatg

SEQ ID NO: 166 - DNA, 41 bp, Homo sapiens
  source 1..41: mol_type = other DNA
ctgtcttttcagtcgggcgctgagtggtttttcggatcatg

SEQ ID NO: 167 - DNA, 37 bp, Homo sapiens
  source 1..37: mol_type = other DNA
gtttcttttctttgaatgacagaactacagcataatg

SEQ ID NO: 168 - DNA, 142 bp, Homo sapiens
  source 1..142: mol_type = other DNA
gcgcctcctccgcccgccgcccgggagccgcagccgccgccgccactgccactcccgctctctcagcgccgccgtcgccaccgccaccgccaccgccactaccaccgtctgagtctgcagtcccgagatcccagccatcatg

SEQ ID NO: 169 - DNA, 105 bp, Homo sapiens
  source 1..105: mol_type = other DNA
ccgccttttacttcggcccgcttcttctggtcactccgccaccgtagaatcgcctaccatttggtgcaagcaaaaagcaatcagcaattggacaggaaaagaatg

SEQ ID NO: 170 - DNA, 60 bp, Homo sapiens
  source 1..60: mol_type = other DNA
cttcctctttctcgactccatcttcgcggtagctgggaccgccgttcagtcgccaatatg

SEQ ID NO: 171 - DNA, 194 bp, Homo sapiens
  source 1..194: mol_type = other DNA
ctgtctctttcgctccgctacaacaacaaacgtgcacaggggagtgagggcagggcgctcgcagggggcacgcagggagggcccagggcgccagggaggccgcgccgggctaatccgaaggggctgcgaggtcaggctgtaaccgggtcaatgtgtggaatattggggggctcggctgcagacttggccaaatg

SEQ ID NO: 172 - DNA, 183 bp, Homo sapiens
  source 1..183: mol_type = other DNA
gccccttttcacaatatttgattaggaatttggggcgggaccctggtctggcacaggcacgcacactctcagtagactctttcactcctctctctcttcctctctcacacgttctccaacccaaggaggccagacagagggacgtggtcactctctgaaaagttcaacttgagagacaaaatg

SEQ ID NO: 173 - DNA, 206 bp, Homo sapiens
  source 1..206: mol_type = other DNA
cgttcttcgccgagagtcgtcggggtttcctgcttcaacagtgcttggacggaacccggcgctcgttccccaccccggccggccgcccatagccagccctccgtcacctcttcaccgcaccctcggactgccccaaggcccccgccgccgctccagcgccgcgcagccaccgccgccgccgccgcctctccttagtcgccgccatg

SEQ ID NO: 174 - DNA, 80 bp, Homo sapiens
  source 1..80: mol_type = other DNA
cgctctctgctcctcctgttcgacagtcagccgcatcttcttttgcgtcgccagccgagccacatcgctcagacaccatg

SEQ ID NO: 175 - DNA, 36 bp, Homo sapiens
  source 1..36: mol_type = other DNA
caccctctctggacagcccagggccgcaggctcatg

SEQ ID NO: 176 - DNA, 99 bp, Homo sapiens
  source 1..99: mol_type = other DNA
ctgtccttaccttcagcaggagccggttccctgtgtgtgtgtccgctcgccctctgctccgtcctgcggctgcccactgccctcctacggtccaccatg

SEQ ID NO: 177 - DNA, 176 bp, Homo sapiens
  source 1..176: mol_type = other DNA
gcgcctcttccggttaccttttcccagcgccagaggcgcctagggttggggtcctcgctcaggcacagagacccgacaccgagcggcggcttccccgggatcgagggacgcgcacgccagaggagacgaaaggaacccgggtcggaccagatcggaaccactgaccattgcccatg

SEQ ID NO: 178 - DNA, 190 bp, Homo sapiens
  source 1..190: mol_type = other DNA
cggcctccttctgcctaggtcccaacgcttcggggcaggggtgcggtcttgcaataggaagccgagcgtcttgcaagcttcccgtcgggcaccagctactcggccccgcaccctacctggtgcattccctagacacctccggggtccctacctggagatccccggagccccccttcctgcgccagccatg

SEQ ID NO: 179 - DNA, 23 bp, Homo sapiens
  source 1..23: mol_type = other DNA
cattctccccagaggccgagatg

SEQ ID NO: 180 - DNA, 71 bp, Homo sapiens
  source 1..71: mol_type = other DNA
gctccctttagcgagtccttcttttcctgactgcagctcttttcattttgccatccttttccagctccatg

SEQ ID NO: 181 - DNA, 65 bp, Homo sapiens
  source 1..65: mol_type = other DNA
ctgtcctttcgtggctcactccctttcctctgctgccgctcggtcacgcttgctctttcaccatg

SEQ ID NO: 182 - DNA, 62 bp, Homo sapiens
  source 1..62: mol_type = other DNA
ccgccttccctgcgcagtcggtgtctccgcgtcgctgggtgggacttggctcggcggccatg

SEQ ID NO: 183 - DNA, 109 bp, Homo sapiens
  source 1..109: mol_type = other DNA
ctcccttcttgactctctgttcacagaactcaggctgcctccagccagcctttgcccgctagactcactggccctgagcacttgaaggtgcagcaagtcactgagaatg

SEQ ID NO: 184 - DNA, 68 bp, Homo sapiens
  source 1..68: mol_type = other DNA
ctgtccctcactcgccgccgacgacctgtctcgccgagcgcacgccttgccgccgccccgcagaaatg

SEQ ID NO: 185 - DNA, 61 bp, Homo sapiens
  source 1..61: mol_type = other DNA
ccgccttttcccctgcctgcccttcgggcacctcaggaaggcaccttcctctgtcagaatg

SEQ ID NO: 186 - DNA, 217 bp, Homo sapiens
  source 1..217: mol_type = other DNA
cgtcctctggccgcgcctgcggccgcacgcccagcgcccctcgcctaacctcgcgcccgggccgcgcctcctcctcctcctgctccccgccgcttccgtttctcgagggaaaggctgctgcctcctgctctgtcctcatccccggcttagctgacggcccagagggtgggtgccaattccaccagcagctgcaactgaaaagcaaggttcagaaatg

SEQ ID NO: 187 - DNA, 186 bp, Homo sapiens
  source 1..186: mol_type = other DNA
gtttcctctccttgttttgctttcgatctggactgttctcaggcaagccggggagtaacttttagttttgctcctgcgattattcaactgacgggctttcatttccatttcacataccctagcaacacttataccttgcggaattgtattggtagcgtgaaaaaagcacactgagagggcaccatg

SEQ ID NO: 188 - DNA, 136 bp, Homo sapiens
  source 1..136: mol_type = other DNA
ttttcttcttttttcttctttcttaaagcgaactgtactcctctgctgttcctttgaacttggttcagtaggaagaagtgatatcctccccagaccatctgctttggggagcttggcaaaactgtccagcaaaatg

SEQ ID NO: 189 - DNA, 351 bp, Homo sapiens
  source 1..351: mol_type = other DNA
ccgccttcctccctccctcgctccctccctgcgcgccgcctctcactcacagcctcccttccttctttctccctccgcctcccgagcaccagcgcgctctgagctgcccccagggtccctcccccgccgccagcagcccatttggagggaggaagtaagggaagaggagaggaaggggagccggaccgactacccagacagagccggtgaatgggtttgtggtgacccccgccccccaccccaccctcccttcccacccgacccccaacccccatccccagttcgagccgccgcccgaaaggccgggccgtcgtcttaggaggagtcgccgccgccgccacctccgccatg

SEQ ID NO: 190 - DNA, 92 bp, Homo sapiens
  source 1..92: mol_type = other DNA
ctctccccctcctccccctcccgctccaagattcgccgccgccgccgccgcagccgcaggagtagccgccgccggagccgcgcgcagccatg

SEQ ID NO: 191 - DNA, 64 bp, Homo sapiens
  source 1..64: mol_type = other DNA
gctcctcccgcgaatcgcagcttctgagaccagggttgctccgtccgtgctccgcctcgccatg

SEQ ID NO: 192 - DNA, 145 bp, Homo sapiens
  source 1..145: mol_type = other DNA
attcccttctttgggctcgggggctcccggagcagggcgagagctcgcgtcgccggaaaggaagacgggaagaaagggcaggcggctcggcgggcgtcttctccactcctctgccgcgtccccgtggctgcagggagccggcatg

SEQ ID NO: 193 - DNA, 85 bp, Homo sapiens
  source 1..85: mol_type = other DNA
ctgtcttttccgtgctacctgcagaggggtccatacggcgttgttctggattcccgtcgtaacttaaagggaaattttcacaatg

SEQ ID NO: 194 - DNA, 175 bp, Homo sapiens
  source 1..175: mol_type = other DNA
ttttctttcctggctgatgatttgtcattctagtcacttcctgccttgtgaccacacacccaggcttgacaaagctgttctgcagatcagaaagaaggggttcctggtcatacaccagtactaccaaggacagcttttttcctgcaagatctgttacctaaagcaataaaaaatg

SEQ ID NO: 195 - DNA, 72 bp, Homo sapiens
  source 1..72: mol_type = other DNA
ccatctctctcgggtggagtcttctgacagctggtgcgcctgcccgggaacatcctcctggactcaatcatg

SEQ ID NO: 196 - DNA, 128 bp, Homo sapiens
  source 1..128: mol_type = other DNA
ttctctcttttttgcacatctggctgaactgggagtcaggtggttgacttgtgcctggctgcagtagcagcggcatctcccttgcacagttctcctcctcggcctgcccaagagtccaccaggccatg

SEQ ID NO: 197 - DNA, 498 bp, Homo sapiens
  source 1..498: mol_type = other DNA
tgttcctttcccctccgcttctctgacctagctgcgcggccccggcccgggagctgccgaacccgcgcctcccctgggtgaggaggacacgcctgccctcgtcgagaaaacttttcctgccgactcagttggggcggcggtggcaggaagtgcgggcagcgacctctcctccgcctgccccgcgcgccctgccggaggtcggcgctgagcttgcgatcaagtttgtgggggccccccttcccagttgccggcgagtctcgcctcgagaggggcgcccgaccccggggagggcggcaggccagggcgaaggccaagggcgtgtggtggcgccggagactaggtgcggagcaaggcggggactcgcacccgcatccgagagcgcggaggtcgcgcagcccgggagaagggagcctccggcggctgcttcctagagtccacagtgcgctgtctcctttggctgaggagagtgtcctggccccgagtctatcgaggaaaatg

SEQ ID NO: 198 - DNA, 127 bp, Homo sapiens
  source 1..127: mol_type = other DNA
ccgcctcttttcccgagatgccccggggagggaggacaacaccttcaaagacaggccctctgagtccgacgagctccagaccatccaagaagacagtgcagccacctccgagagcctggatgtgatg

SEQ ID NO: 199 - DNA, 401 bp, Homo sapiens
  source 1..401: mol_type = other DNA
cattcttcccaggacctcagcgcagccctggcccaggaaggcaggagacagaggccaggacggtccagaggtgtcgaaatgtcctggggacctgagcagcagccaccagggaagaggcagggagggagctgaggaccaggcttggttgtgagaatccctgagcccaggcggtagatgccaggaggtgtctggactggctgggccatgcctgggctgacctgtccagccagggagagggtgtgagggcagatctgggggtgcccagatggaaggaggcaggcatgggggacacccaaggccccctggcagcaccatgaactaagcaggacacctggaggggaagaactgtggggacctggaggcctccaacgactccttcctgcttcctggacaggactatg

SEQ ID NO: 200 - DNA, 131 bp, Homo sapiens
  source 1..131: mol_type = other DNA
gggcctttcccagtgcggccgccgccgccacagctgcagtcagcaccgtcaccccagcagcatccgccgcctgcaccgcgcgtgcggcccgccccggcctgaccccgccgccgaacccggcgccagccatg

SEQ ID NO: 201 - DNA, 396 bp, Homo sapiens
  source 1..396: mol_type = other DNA
agctctctgctcgctctgctcgcagtcacagacacttgagcacacgcgtacacccagacatcttcgggctgctattggattgactttgaaggttctgtgtgggtcgccgtggctgcatgtttgaatcaggtggagaagcacttcaacgctggacgaagtaaagattattgttgttattttttttttctctctctctctctcttaagaaaggaaaatatcccaaggactaatctgatcgggtcttccttcatcaggaacgaatgcaggaatttgggaactgagctgtgcaagtgctgaagaaggagatttgtttggaggaaacaggaaagagaaagaaaaggaaggaaaaaatacataatttcagggacgagagagagaagaaaaacggggactatg

SEQ ID NO: 202 - DNA, 1338 bp, Homo sapiens
  source 1..1338: mol_type = other DNA
agcccttcttggggaagtcagctacccagcagcctgtagtcctcggctacccaccctcaccgcctggggtcccatggtgagacagctgggtgggcatcaggcttctgcagagggccaggccggagggagctgggcgagggagtggggctggctcctggcttgcaccggcctcgtggaatccaggcctcagacctgatcgctggcgaaactggctctgtgcgctggagcccctggtcttctgcgtctgtcctcctcccggccagactttactcctggctcagcgacaggtatttgctatggaagagctgtccctccctcccctcggtgggcctgggtccacctccacctcctcttcaggtccgcaccttcctcccctttaaaacaccagccgggcgcagacccgttctaggcttttccatggtgcttccgccaaagcttgtgaccgagtccttcccgcctagggctggtgggcctcccctgctggtaggtctctcttcgctttctttactcagaactgaagctctcattccccacccaccaaggaaaaacaaaagggaagaagccacagctggccccggcttgctttggcacaggtgtttccccccggccccccgtcgggcaccctggttcctgttctgtccctgccccacgcgaccctggggctcccacccgggctcctcagcctcccctgggttggggtggggggactggctcccagcccttggcctagggtttggtgaacgcctttcctggactgcgggcccacttcaggcgcggctccaggctgggcagctgcgctggagggccgagggcaggggtggggtcgggcgtccaccctcagggttgcgccagggagccggaaagccgactcccgaagttggggtcctgggaaaacttgggtcctgggttgactgagaagcggcggggaaaggaggcgggccaggaggagggggcctggcggacgccggccggggggcggggcgcggcggggctgtcggtcacgcccctcagtccgccccgccccgccccgcctgccggggaagggccacgttgcccgcccggccgtccggccccggcgcgccgcagaaagggctggcgagtcgaaaggcgaggcggccgcggcagcgcttgggacgcgcctgggcaccgggctcgctccctgcgccccggagcaggccaagttcggggccaggacgtcgggaggacctggtgcatggctgcctcctaatcccatagtccagaggaggcatccctaggactgcgggcaagggagccgggcaagcccagggcagccttgaaccgtcccctggcctgccctccccggtgggggccaggatg

SEQ ID NO: 203 - DNA, 522 bp, Homo sapiens
  source 1..522: mol_type = other DNA
ctgcctcccgcccccggggccaaagtacaaagggaggaggaagaagggagcggggtcggagccgtcggggccaaaggagacggggccaggaacaggcagtctcggcccaactgcggacgctccctccaccccctgcgcaaaaagacccaaccggagttgaggcgctgcccctgaaggccccaccttacacttggcgggggccggagccaggctcccaggactgctccagaaccgagggaagctcgggtccctccaagctagccatggtgaggcgccggaggccccggggccccacccccccggcctgaccacactgccctgggtgccctcctccagaagcccgagatgcggggggccgggagacaacactcctggctccccagagaggcgtgggtctggggctgagggccagggcccggatgcccaggttccgggactagggccttggcagccagcgggggtggggaccacgggcacccagagaaggtcctccacacatcccagcgccggctcccggccatg

SEQ ID NO: 204 - DNA, 90 bp, Homo sapiens
  source 1..90: mol_type = other DNA
ccgccttctccgcagccccgcaggccccgggccctgtcattcccagcgctgccctgtcttgcgttccagtgttccagcttctgcgagatg

SEQ ID NO: 205 - DNA, 562 bp, Homo sapiens
  source 1..562: mol_type = other DNA
ggccctttataatgcgagggtctggacggctgaggacccccgagctgtgctgctcgcggccgccaccgccgggccccggccgtccctggctcccctcctgcctcgagaagggcagggcttctcagaggcttggcgggaaaaagaacggagggagggatcgcgctgagtataaaagccggttttcggggctttatctaactcgctgtagtaattccagcgagaggcagagggagcgagcgggcggccggctagggtggaagagccgggcgagcagagctgcgctgcgggcgtcctgggaagggagatccggagcgaatagggggcttcgcctctggcccagccctcccgctgatcccccagccagcggtccgcaacccttgccgcatccacgaaactttgcccatagcagcgggcgggcactttgcactggaacttacaacacccgagcaaggacgcgactctcccgacgcggggaggctattctgcccatttggggacacttccccgccgctgccaggacccgcttctctgaaaggctctccttgcagctgcttagacgctg

SEQ ID NO: 206 - DNA, 38 bp, Homo sapiens
  source 1..38: mol_type = other DNA
tggcctctcggttccgcggcgcaccggagggcagcatg

SEQ ID NO: 207 - DNA, 88 bp, Homo sapiens
  source 1..88: mol_type = other DNA
cttcctctccaggaatccgcggagggagcgcaggctcgaagagctcctggacgcagaggccctgcccttgccagacggcgcagacatg

SEQ ID NO: 208 - DNA, 29 bp, Homo sapiens
  source 1..29: mol_type = other DNA
ccttcttcctcctgcccgtagtagccatg

SEQ ID NO: 209 - DNA, 37 bp, Homo sapiens
  source 1..37: mol_type = other DNA
ccgtcctttcatcctggcgtttgcctgcagcaagatg

SEQ ID NO: 210 - DNA, 159 bp, Homo sapiens
  source 1..159: mol_type = other DNA
tgccccttccccggccaagcccaactccggatctcgctctccaccggatctcacccgccacacccggacaggcggctggaggaggcgggcgtctaaaattctgggaagcagaacctggccggagccactagacagagccgggcctagcccagagacatg

SEQ ID NO: 211 - DNA, 101 bp, Homo sapiens
  source 1..101: mol_type = other DNA
gcccctcctccgccgccggctcccgggtgtggtggtcgcaccagctctctgctctcccagcgcagcgccgccgcccggcccctccagcttcccggaccatg

SEQ ID NO: 212 - DNA, 108 bp, Homo sapiens
  source 1..108: mol_type = other DNA
gcgtcctttccctggtgtgattccgtcctgcgcggttgttctctggagcagcgttcttttatctccgtccgccttctctcctacctaagtgcgtgccgccacccgatg

SEQ ID NO: 213 - DNA, 456 bp, Homo sapiens
  source 1..456: mol_type = other DNA
cattccttttgtagaaaaacccgtgcctcgaatgaggcgagactcagagaggacccaggcgcggggcggacccctccaattccttcctcgcgcccccgaaagagcggcgcaccagcagccgaactgccggcgcccaggctccctggtccggccgggatgcggccggtacccgctccccgccgggaacaacctctccactcttcctgcagggagctggtgccagccgacagccgcgccagggccgctccgggtaccagggtcggatcgggtgacgtcgcgaacttgcgcctggccgccaagccggcctccaggctgaagaaggacccgccccggccttgacccgggccccgcccctccagccggggcaccgagccccggccctagctgctcgcccctactcgccggcactcgcccggctcgcccgctttcgcacccagttcacgcgccacagctatg

SEQ ID NO: 214 - DNA, 104 bp, Homo sapiens
  source 1..104: mol_type = other DNA
gcgtcttcccgagccagtgtgctgagctctccgcgtcgcctctgtcgcccgcgcctggcctaccgcggcactcccggctgcacgctctgcttggcctcgccatg

SEQ ID NO: 215 - DNA, 512 bp, Homo sapiens
  source 1..512: mol_type = other DNA
gcttccccttctccccggcggttagtgctgagagtgcggagtgtgtgctccgggctcggaacacacatttattattaaaaaatccaaaaaaaatctaaaaaaatcttttaaaaaaccccaaaaaaatttacaaaaaatccgcgtctcccccgccggagacttttattttttttcttcctcttttataaaataacccggtgaagcagccgagaccgacccgcccgcccgcggccccgcagcagctccaagaaggaaccaagagaccgaggccttcccgctgcccggacccgacaccgccaccctcgctccccgccggcagccggcagccagcggcagtggatcgaccccgttctgcggccgttgagtagttttcaattccggttgatttttgtccctctgcgcttgctccccgctcccctccccccggctccggcccccagccccggcactcgctctcctcctctcacggaaaggtcgcggcctgtggccctgcgggcagccgtgccgagatg

SEQ ID NO: 216 - DNA, 270 bp, Homo sapiens
  source 1..270: mol_type = other DNA
cgctctttctctccggtacacacagctccccacattcgcacccctgcccgcgcgccgggccgcctgactgcacggcttcccctccagccagatgctggagaacacacactgattcgctgctttccaagaccctgttcagtctctttctctatacaaagatttttttaaaaactatatataagaattctttatttgcaccctccctccgagtcccctgctccgccagcctgcgcgcctcctagcaccacttttcactcccaaagaaggatg

SEQ ID NO: 217 - DNA, 65 bp, Homo sapiens
  source 1..65: mol_type = other DNA
gggtctttccctcactcgtcctccgcgcgtcgccgctcttcggttctgctctgtccgccgccatg

SEQ ID NO: 218 - DNA, 222 bp, Homo sapiens
  source 1..222: mol_type = other DNA
cgctcccctttcccctcccgccggacctgccaggaggtgggctggcgcggagggagggccctgtcccctgtccctttaaggaggagggccaaacgccggcctagagtgcggcgtagcccccacccgccgtgccctcaccccagagcagctgcagcctcagccggccgcccctccgccagccaagtccgccgctctgacccccggcagcaagtcgccaccatg

SEQ ID NO: 219 - DNA, 300 bp, Homo sapiens
  source 1..300: mol_type = other DNA
cggcctctgtgagccgcaacctttccaagggagtggttgtgtgatcgccatcttagggagtgagtgtggccgggccttctcctgtggcgggtgtggggagcggagcccagagctcctgtggggccgctgctttggcggtgggcccagccgggagcagcctctttcgaaggccgccgtgacctcttcaagggcgtggagacgggaaggaaaaggccccggttggggttccagggcgccggtaacgttaaccggcgccttgcctgtcctctaaccgtcgctccctcctcccctagaaagatg

SEQ ID NO: 220 - DNA, 437 bp, Homo sapiens
  source 1..437: mol_type = other DNA
cctcccctttactcctggctgcggggcgagccgggcgtctgctgcagcggccgcggtggctgaggaggcccgagaggagtcggtggcagcggcggcggcgggaccggcagcagcagcagcagcagcagcagcagcaaccactagcctcctgccccgcggcgctgccgcacgagccccacgagccgctcaccccgccgttctcagcgctgcccgaccccgctggcgcgccctcccgccgccagtcccggcagcgccctcagttgtcctccgactcgccctcggccttccgcgccagccgcagccacagccgcaacgccacccgcagccacagccacagccacagccccaggcatagccttcggcacagccccggctccggctcctgcggcagctcctctgggcaccgtccctgcgccgacatcctggaggttgggatg

SEQ ID NO: 221 - DNA, 279 bp, Homo sapiens
  source 1..279: mol_type = other DNA
ggatctcttcgtctttgcagcgtagcccgagtcggtcagcgccggaggtgagcggtgcaggaggctacgccatcagtccccaccaagggccagtcgcccggctagtgcggaatcccggcgcgccggccggccccgggcacgcaggcagggcggcgcaggatccagggcgtctgggatgcagtggagctcagagagaggagaacggctcctcacgcctggggcctgctcttcagaagtccccagcgccgttccttccagatcaggacctcagcagccatg

SEQ ID NO: 222 - DNA, 571 bp, Homo sapiens
  source 1..571: mol_type = other DNA
cggcctcctcggcgcagccatcctcttggctgccgcgggcggcaaagcccacggcatctgccatttgtcattcagcccgtcggtaccgccccgagccttgatttagacacggctggggcgtgctctggcctcactctccgggcgggtgctggacggacggacggacggggcagccgtgctcacagctcagcagcgcggggccttggcgcgcggggcgcttccccgggtcgccgtcatggccgcggaggtggcacgcccgagcggcctcgcctgagctccgggggtcgtcgccccgcagggattgctgtcacgtctaatgtggctgctgcctcgtgtcacatctgaaactcatctgtacctcacttagaaagtggttctgattagacaagacttttcgttgcagtcgacagaaacctaatgggaccattgaagaattccaaacaggtatttgcataggaatcagaggagttaatcttgtctcttctcacaggtttgaatcttcagacaaacttctgggaggactcggtccctgcctcgcagcagatgttccctgtcactcagtaggcatatg

SEQ ID NO: 223 - DNA, 53 bp, Homo sapiens
  source 1..53: mol_type = other DNA
tgctctcttggctccggaacccccgcgggcgctggctccgtctgccagggatg

SEQ ID NO: 224 - DNA, 110 bp, Homo sapiens
  source 1..110: mol_type = other DNA
cccccttcccggccagacggcgggcaagacagctgggtgtacagcgtcctcgaaaccacgagcaagtgagcagatcctccgaggcaccagggactccagcccatgccatg

SEQ ID NO: 225 - DNA, 81 bp, Homo sapiens
  source 1..81: mol_type = other DNA
cagtcctttcgcgcctcggcggcgcggcatagcccggctcggcctgtaaagcagtctcaagcctgccgcagggagaagatg

SEQ ID NO: 226 - DNA, 31 bp, Homo sapiens
  source 1..31: mol_type = other DNA
ggtccttccacgtgctttcggcggcgacatg

SEQ ID NO: 227 - DNA, 191 bp, Homo sapiens
  source 1..191: mol_type = other DNA
tgttcttctcgtggttccagtggggagagaaggaggaagtagggagcggggtggcaggggggggacccgccgcggctgctgccaccgccgccaccaccgcctctgctcgtggcgtgggaaaggaggtgtgagtcccgggcgcgagccggcggcggcgccgctgcgggagggtcggcggtgggaaggcgatg

SEQ ID NO: 228 - DNA, 61 bp, Homo sapiens
  source 1..61: mol_type = other DNA
cggtcttccagtttcccggcgtgcttagggcgcgccaaatgggagggggagacgcaagatg

SEQ ID NO: 229 - DNA, 75 bp, Homo sapiens
  source 1..75: mol_type = other DNA
cggcctccgccgctgccgccgccgctgctacagccgccgccgccgctgttgccgcggcttgttattcttaaaatg

SEQ ID NO: 230 - DNA, 156 bp, Homo sapiens
  source 1..156: mol_type = other DNA
ctttctttctgcagcaggaaccgcggctgctggacaagaggggtgcggtggatactgacctttgctccggcctcgtcgtgaagacacagcgcatctccccgctgtaggcttcctcccacagaacccgtttcgggcctcagagcgtctggtgagatg

SEQ ID NO: 231 - DNA, 800 bp, Homo sapiens
  source 1..800: mol_type = other DNA
cgccccctcttcctcgccctctctcgcgggtcggggttacatggcggcgactgcggcaaagcgagagcctcggagacgccgctgccgccagcacagccggagacctgagccgacactgggggcagtccgcgagccccgcactctctcgatgagtcggagaagtcccgttgtatcagagtaagatggacggtagctttgattgtgattgtggtgagctggagccacctgatcactaacaaaagacatcttctgttaaccaacagccgccagggcttcctgttgaaataaatatatagcaacaaaggaaaaaaagaagcaaaacggaaatagtgcttaccagcaccttagaatgatgctgctcaggaccagtccaacactgaatgtatctgcactgtgaggagaatgttcatagaagcctgttgtgtgcatatttattcacatttttgttaaatgttaaatcgtttagcacggtaatctgagtgcacagtatgtcatttcattccgtttgagtttcttgttttcgttaaatgtctgcagagttgctgcccctttcttgaactatgagtactgcaatctttttaattctcaatatgaatagagctttttgagctttaaatctaaggggaactcgacaggcctgtttggcatatgcaatgaacatcaagaaaccatcttgctgtggaagcataattatttttcttctccctttttgaaagatctttccttttgatgccagttttcttccttgtttacacaagttcaatttgaaaggaaaaggcaatagtaagggtttcaaaatg

SEQ ID NO: 232 - DNA, 131 bp, Homo sapiens
  source 1..131: mol_type = other DNA
cctccccttccctacatctagccgccgcgctttcccgctcccgcagcagcagcctcccgcgtcgctgtcgctgttgcctccgccacctcctccgccgccgcgcgcccctcggagttccgcgccccaccatg

SEQ ID NO: 233 - DNA, 218 bp, Homo sapiens
  source 1..218: mol_type = other DNA
ttgcctctggctctgaggcggcggcgccgggcgctgcgaaggctcggccgctgtagtcagtggtgtggggtgcgcaagggcacggacctcggagctctccccgcttgcgccgagtttctcagcgccttccccacccaaaccggggtctcgcagtcggaagcactcagagtgcagccccgcgcggggccggtcgtaaccgcgccgcgggccggacgatg

SEQ ID NO: 234 - DNA, 26 bp, Homo sapiens
  source 1..26: mol_type = other DNA
agttctttctgcccacactagacatg

SEQ ID NO: 235 - DNA, 35 bp, Homo sapiens
  source 1..35: mol_type = other DNA
tgttcttctgtgccgggggtcttcctgctgtcatg

SEQ ID NO: 236 - DNA, 76 bp, Homo sapiens
  source 1..76: mol_type = other DNA
cagcccctctggcaggctcccgccagcgtcgctgcggctccggcccgggagcgagcgcccggagctcggaaagatg

SEQ ID NO: 237 - DNA, 158 bp, Homo sapiens
  source 1..158: mol_type = other DNA
ctccctttgcaggacgtcacggaggactgcaggggcctgagccgctgctgccgccgccgccgcgcagccccacatcaacgcaccggggtcctgtcaccgccaccgccaaaaaagtcaccgccgctagggtcgccgttgcatcggtgcagggcaagatg

SEQ ID NO: 238 - DNA, 48 bp, Homo sapiens
  source 1..48: mol_type = other DNA
ctctctctctctctctctcgctcgttccctaacattaaagagaaaatg

SEQ ID NO: 239 - DNA, 174 bp, Homo sapiens
  source 1..174: mol_type = other DNA
gcgcccctctgctccggctcggggcgggcactggcggagggactggccagtcccctcctccgcgccggccccaaccctgtcgctgccgccgcgctccgagtccccattcccgagctgccgctgttgtcgctcgctcagcgtctccctctcggccgccctctcctcgggacgatg

SEQ ID NO: 240 - DNA, 246 bp, Homo sapiens
  source 1..246: mol_type = other DNA
ccgccttttcccgcggaggcgccgagcggccatattgcggagctgtctgcggtggcggcggcgcctctcgtctcccgcggcccagcgctcgcaccaccgcttctccctccctgtcgcagccgcgccgccgcgcagcgccccagccacacgccggcgggcagaagccgcccgctctccggaaagtgataacagaattcattgaagtggagaatttttaaagaaggtaacaaaaagagaaagaaaatg

SEQ ID NO: 241 - DNA, 120 bp, Homo sapiens
  source 1..120: mol_type = other DNA
tcgccttcttgcacttcgcgggagaagttgttggcgcgaatggatcctgagcctcgataacagattcctcaaccggcccacccgccagccagccagcgccttcatcctggggctgcgatg

SEQ ID NO: 242 - DNA, 284 bp, Homo sapiens
  source 1..284: mol_type = other DNA
gcatctttctcgaggagctctcctgggcggctgaagaaggagcttcttctccggagtgcgccggcggtggcgcctgcggacctaactagctccaggttaggccgagctttgcgggaaagcagcggacttgaaaatactggaaatctgtccggatccaaattattttgcaagccagatgagtaaccagagggcatgaaaggttgagaacatttgacttccctgcaaaccttggtatagatcacttccttttctgtaggaaaggaaaggcaccaaagagcacaatg

SEQ ID NO: 243 - DNA, 17 bp, Homo sapiens
  source 1..17: mol_type = other DNA
tgctcttcccggtcatg

SEQ ID NO: 244 - DNA, 49 bp, Homo sapiens
  source 1..49: mol_type = other DNA
cgttcttccttttcgatccgccatctgcggtggagccgccaccaaaatg

SEQ ID NO: 245 - DNA, 311 bp, Homo sapiens
  source 1..311: mol_type = other DNA
cttcctttagcgtgaaccgcgggtgcggtgcctcccgtgaaaataataaattcaccgtcacgcttgttgtgaacgcgggtggttcccgaaacttggaggcttcccgtaaacccagctccttcctcatctgggaggtgggtcccgcgcgggtccgccgcctcctccctggcccctccctctcgtgtctttcattttcctggggctccggggcgcggagaagctgcatcccagaggagcgcgtccaggagcggacccgggagtgtttcaagagccagtgacaaggaccaggggcccaagtcccaccagccatg

SEQ ID NO: 246 - DNA, 125 bp, Homo sapiens
  source 1..125: mol_type = other DNA
ctttcttttgcgcaggcgtcgcgccctggggccggggccgggcggcaccgcggtgcgcaagcgcaaccgtcggtgggtcggggatcggtcgcctgagaggtatcacctcttctgggctcaagatg

SEQ ID NO: 247 - DNA, 134 bp, Homo sapiens
  source 1..134: mol_type = other DNA
agttctccttccaccttcccccacccttctctgccaaccgctgtttcagcccctagctggattccagccattgctgcagctgctccacagcccttttcaggacccaaacaaccgcagccgctgttcccaggatg

SEQ ID NO: 248 - DNA, 339 bp, Homo sapiens
  source 1..339: mol_type = other DNA
cgccctcctacttccccgtctgcgtccgcgttcgcggctcccgtttgcatcatccccgtctgcgtccgcgttcgcggctcccgtttgcatcatctccagccggcggctgctccagggaggctgggcgcgatcctctccgcccgcggctccaacccgcactctgcgcctctcctcgcctttctcgcacctgctcctgcgccaggcccggagacccccggggcggcttcccagaacctgcggagcacaactggccgaccgacccattcattgggaaccccgtcttttgccagagcccacgtcccctgccacctctagctcggagcggcgtgtagcgccatg

SEQ ID NO: 249 - DNA, 22 bp, Homo sapiens
  source 1..22: mol_type = other DNA
ctgcctctttctgagcggcatg

SEQ ID NO: 250 - DNA, 53 bp, Homo sapiens
  source 1..53: mol_type = other DNA
ctatctctcgataaagttgttgttgcggcttccgccgcgggtggaagaagatg

SEQ ID NO: 251 - DNA, 560 bp, Homo sapiens
  source 1..560: mol_type = other DNA
ctatctctcatctttccgctcttagctgggagtgctccgcctagtcacttttcttaaggtggctcgtcgaggcctgacttcttccccgaaatcacgtccctagacagcctcctattttaccactaactttactcctgcagttattcagcggtaggaaactgaaaccaaaaaccagtgtaagcaagtaaacatctaaactgtttcaggagccgcgtagaaggaacgcggcggtgtgccccggaagcggaagtagattctcctatagaaaggctggactacgcggagtggtgacgtttcctcattgggcggaaggttcgctggcactccgttggtcttccagctggtgggagttgacgacgtggtgctgggcgttgggaccctactttatctagttcgggaagttgggttgtggggtcatacctgtctgtctgctcccagctttcttgggtttcttccgacggcgtggggcctcgctaaggaattcccggcccctcagggccacggctttagcggtgtcttttgcgagttcttcgtaagtacatcttaaagctgtcaagatg

SEQ ID NO: 252 - DNA, 71 bp, Homo sapiens
  source 1..71: mol_type = other DNA
cggtctttcggatgctgacgctctcttcctgtctttgtggctccggaaaggcgtttgggatgccaacgatg

SEQ ID NO: 253 - DNA, 161 bp, Homo sapiens
  source 1..161: mol_type = other DNA
ttttctttttggtggtggtggtggaaggggggaggtgctagcagggccagccttgaactcgctggacagagctacagacctatggggcctggaagtgcccgctgagaaagggagaagacagcagaggggttgccgaggcaacctccaagtcccagatcatg

SEQ ID NO: 254 - DNA, 23 bp, Homo sapiens
  source 1..23: mol_type = other DNA
tgttcttcccatcggcgaagatg

SEQ ID NO: 255 - DNA, 199 bp, Homo sapiens
  source 1..199: mol_type = other DNA
ggtccttcccctaaaacttggcactgccgatactcccagcccgttccttcccaagtcaggaacttgcaggggaccccttggcaattctttttctctcaagagcagacagccttcagtcccagccgctgccagggctggtgtgtctgacccagctgtggtttttccaggcctgaaggccccggagtgcaccagcggcatg

SEQ ID NO: 256 - DNA, 897 bp, Homo sapiens
  source 1..897: mol_type = other DNA
cagtctcctccccgaggtgccggtggccccgccgccactccctccggctccctccctcccgccgcggcgcgcatctcattccagccctcattccgcgcattccagcgtcctcctcgcacactcgaggccagggggcgggagggccgcagctccggcgccgccgcgtcccgccaggtgagaggcgcccgcgcccgccgcacccgccggcgccctcacgggccgcgcgccccacgccgccgcagccgaccgctcgcgccgcgtgctcggctgctcttttctttccgccgcccgcgttcccgccttggacctctgcgctccgacgcgctccgtcccgacctctggcttccctccgcgctccggcgctgctcgctgcccctctcccgcttccctcctgtccgccccgcgctcccctcctcgctcccggttgactcactcctccaggaatagggatccccgtgttttcccgtcagtcccattctgggaaaactcctccctccgcgcgctccgctccgctccgctgggcgcaccggggccggtcggcgcggggtgggcttggccccgcggccccgccttcactgcgccgcccgtcggccccggccggagcccggctctgcgcgctgacgccctgtcgtccccgcagaacgatcgccgcggccggaagagttggcgctcggggcggactccttggaactggcttagcgcacccatcccaccttcccgcaccctgggaccggtcggaacgagctgattgcccgctacatcaagctccggacagggaagacccgcaccaggaagcaggtctccagccacatccaggtgctggctcgtcgcaaagctcgcgagatccaggccaagctaaaggaccaggcagctaaggacaaggccctgcagagcatg

SEQ ID NO: 257 - DNA, 86 bp, Homo sapiens
  source 1..86: mol_type = other DNA
ttttctttcctccagtctcggggctgcaggctgagcgcgatgcgcggagacccccgcgggggcggcggcggccgtgagccccgatg

SEQ ID NO: 258 - DNA, 121 bp, Homo sapiens
  source 1..121: mol_type = other DNA
cggccttttccgcccgctcccccctccccccgagcgccgctccggctgcaccgcgctcgctccgagtttcaggctcgtgctaagctagcgccgtcgtcgtctcccttcagtcgccatcatg

SEQ ID NO: 259 - DNA, 46 bp, Homo sapiens
  source 1..46: mol_type = other DNA
ctatcttctttttcttcagcgaggcggccgagctgacgcaaacatg

SEQ ID NO: 260 - DNA, 70 bp, Homo sapiens
  source 1..70: mol_type = other DNA
cggcctccgccaccatcttgctttcctttaatccggcagtgaccgtgtgtcagaacaatcttgaatcatg

SEQ ID NO: 261 - DNA, 539 bp, Homo sapiens
  source 1..539: mol_type = other DNA
ctgcctttcgtgtctctgcagcgtggagactggaaccggcaatttcaaaggacgccacgttcaatcgcagcgctggcgcgggcggaggctaaaacacgggggtcctgagactgaggaaaacgcgccaagttcccctcggtggcggagtgctaaagaccctagcggttcaggcgttcggcgagcggggccgctgcttgttgcgctcctggctctcccggggcgggcgcagatgggcgccgctcccgggatgtagttggtgttggtgcaagacgggagcgagcggcggtcggggttcccgctcttgggagcggatggtcactcccccgcggggagggcgagccgaccagattttcctggggccggggacccggcgggctcggggcagggactcacctgtcgcacccacactcattcgggttggacttgccggcgtcaccgccgcggacttcgctttgggccatgaccagatataattggtgattacaactttcctctataaattaactcttgacactccttgggatttgaagaaaaaaatg

SEQ ID NO: 262 - DNA, 143 bp, Homo sapiens
  source 1..143: mol_type = other DNA
gtgtctccttcacttcgccctccagctgctggagctgcagcccgaccgcgagcgtgccaagcggcttcagcagctagcggagcggtggcggcggcccccctcaggacaccaccagattcccctcttcccgcggcctcgccatg

SEQ ID NO: 263 - DNA, 68 bp, Homo sapiens
  source 1..68: mol_type = other DNA
gcctcttctccgggagccagtccgcgccaccgccgccgcccaggccatcgccaccctccgcagccatg

SEQ ID NO: 264 - DNA, 423 bp, Homo sapiens
  source 1..423: mol_type = other DNA
ccccctccccgctgctcaccccgctctccggccgccgccggtgcgggtgctccgctaccggctcctctccgttctgtgctctcttctgctctcggctccccaccccctctcccttccctcctctccccttgcctcccctcctctgcagcgcctgcattattttctgcccgcaggctcggcttgcactgctgctgcagcccggggaggtggctgggtgggtggggaggagactgtgcaagttgtaggggagggggtgccctcttcttccccgctcccttcccccgccaactccttcccctccttctccccctttcccctccccgcccccaccttcttcctcctttcggaaggactggtaacttgtcgtgcggagcgaacggcggcggcggcggcggcggcggcaccatccaggcgggcaccatg

SEQ ID NO: 265 - DNA, 283 bp, Homo sapiens
  source 1..283: mol_type = other DNA
agtcctttgctcgccggcttgctagctctctcgatcactccctcccttcctccctcccttcctcccggcggccgcggcggcgctggggaagcggtgaagaggagtggcccggccctggaagaatgcggctctgacaaggggacagaacccagcgcagtctccccacggtttaagcagcactagtgaagcccaggcaacccaaccgtgcctgtctcggaccccgcacccaaaccactggaggtcctgatcgatctgcccaccggagcctccgggcttcgacatg

SEQ ID NO: 266 - DNA, 95 bp, Homo sapiens
  source 1..95: mol_type = other DNA
cagcctctaccttgcgagccgtcttccccaggcctgcgtccgagtctccgccgctgcgggcccgctccgacgcggaagatctgactgcagccatg

SEQ ID NO: 267 - DNA, 155 bp, Homo sapiens
  source 1..155: mol_type = other DNA
gggcctttgtctctggctgcagttggagctctgcgtctcgtcttcgttcttctgtgtcctctgctgctagaggtccagcctctgtggctctgtgacctgcgggtattgggggatccacagctaagacgccaggaccccccggaagcctagaaatg

SEQ ID NO: 268 - DNA, 448 bp, Homo sapiens
  source 1..448: mol_type = other DNA
cagtccttttgtgggagtccggtctgtccacttgccggtccctcagaccgtcggcggtctctgtccgcttcgggacctgtccgctggtcgctccgcgtccgatggctcctggccgcggaaccttaggcctggccctggtctccgagcgcgggttcgccgggaggagcgtgtggcgggggtgtgccggggcgtgagtgcgccgagcatggggctgagcctggtgtggggagtgggtatctgcggagccggcctgaaccccacctcagccgggcgcggggagggggctccgtgcgtgtgatcgtgcagctgtgagcgcgtggccgccccgcggggctccgctgcaggcccctcagccccaggagcagtactcgctcttcagggcctgccctggatcctggaggctacacagctgcccactcctcctggggaggctgccgtggaggccatg

SEQ ID NO: 269 - DNA, 155 bp, Homo sapiens
  source 1..155: mol_type = other DNA
gggcctttgtctctcgctgcagcctgagctctaggtcttgttttccctgctttgtgttttctgctcgtggacgcccagcctctgtggccctgtggcctgcaggtattgggagatccacagctaagacgccgggaccccctggaagcctagaaatg

SEQ ID NO: 270 - DNA, 128 bp, Homo sapiens
  source 1..128: mol_type = other DNA
gggcctttgtctctcgctgccgccggagtttccaggtctcgacttcactgctctgtgtcctctgctccaggaggcccagcctgtgtggccctgtgacctgcaggtattggagagccacagctaagatg

SEQ ID NO: 271 - DNA, 176 bp, Homo sapiens
  source 1..176: mol_type = other DNA
gggtctttgcgtctggctactaccagaccgcgggttaggggcttcatctctctgcgttctcagttgtgggaggccttggtgattcggccacagcctcagcctccgtcgctctgtgacctgcgggtattggatgattggtagctaagactcccgaatacttcagaagtggggaaatg

SEQ ID NO: 272 - DNA, 29 bp, Homo sapiens
  source 1..29: mol_type = other DNA
tgttctttctagctctgaaatagaaaatg

SEQ ID NO: 273 - DNA, 305 bp, Homo sapiens
  source 1..305: mol_type = other DNA
ctcccttttcggagatttgaatttcccccagcgaggcgagtgaggcgaaatacccgtatggtgatagctggccttttcgcgccaatactgaaaaaggcagaacgttcctccgctggcgccagccaatcagcaggactcctgccttccttcggggcaaggtcgcagcatctgcctcggaaatcacgaaatcacggggcttctttctgctggctcagccgggaggcccagagtgttctgcagaggctgcgtattgaaggctgctctctgaagctccctgccccaggtcacgccgccggttccagatg

SEQ ID NO: 274 - DNA, 45 bp, Homo sapiens
  source 1..45: mol_type = other DNA
acttcttttcttggctaagccgcgtttgtactgtgtcttaccatg

SEQ ID NO: 275 - DNA, 171 bp, Homo sapiens
  source 1..171: mol_type = other DNA
ccgcctttgcgctgcgcgcctgcgcccgcgccggcttccagcgggtgtcggacctgagagctggaggggcgtgcgcgcgccctcgctctgttgcgcgcgcggtgtcaccttgggcgcgagcggggccgcgcgcgcacgggacccggagccgagggccattgagtggcgatg

SEQ ID NO: 276 - DNA, 243 bp, Homo sapiens
  source 1..243: mol_type = other DNA
cctcccccttccccggctggggcggctggagagccgggagtcgctgggtgcgtggggctgcctcgccgcgtctcgccacgggctctgccagcagacagccttggcacacaggcacaagggctggagcccagagatgagagtgcccaagggagatgtgagcctggcgggctgcccgctaacctgtcgctgaagccccagaagcgggccctcaggccaggcctaccctgcctccggcccagcatg

SEQ ID NO: 277 - DNA, 687 bp, Homo sapiens
  source 1..687: mol_type = other DNA
aagcctcttttatacatctcttcagggaagagagaagcaatgggcatgttagtatacaatgatcacagccacgcaggcctgcaagctgccttttggacaggctgttgactgccgttccaattagctgattggagaatgtggaatgcagagtgataatgctgcatatctgctatcaggcagcagcaaaggtttttgtcttgggaaggcaagctttccctgcaatattatctcagcagctccctagctgcttaccctgaaaacgagggatccaaacggagggtgttgcactctgctaacgctggtcctgtgcgtggctgtggcatatgagcggcaggtctgaaaaagcaggtgtgtgctgggacgggcactggactggaacgcaggcggacgctctcgggtttacctgcttcctgttaacagattgtgggctcccagggcatatgtctgcacgctgaggccgaggcggagaaggggcttcctgagcgtcccagtacactgacagagacacttggattggacttaatcttaaacctctggagttcaagaccttttaaaaagggctaaataaacaatctctacatgtaaaaggccactgactcctacttcctctgtatagagcaactgttgaactcagctgcctgtaggaaaactgaagactttaataacaaactctccaaggtgaaaatg

SEQ ID NO: 278 - DNA, 540 bp, Homo sapiens
  source 1..540: mol_type = other DNA
gtttctcttcttgacttgatgcaggcacagatttatcaagctcctcagtcaacaaacacatcaccggaagaaatatggaaggaaaggaattttaaaaggaaataccaatctctgtgcaaacaaagccttgtatattcatgtttgcaccaatctactgtgagatttatgaagaaaaacaaattgcggacaactctctatgtacacttacaaatgcctcagttgatgcttgtgggctgtttgtcagcgttctgtgataatgaacacatggacttctgtttattaaattcagttgacccctttagccaattgccaggagcctggatttttacttccaactgctgatatctgtgtaaaaattgatctacatccaccctttaaaagcattgatgaattaattagaactttagacaacaaagaaaaattgaaaaagaattctcagtaaaagcgaattcgatgttcaaaacaaactacaaagagacaagacttctctgtttactttctaagaactaatataattgctaccttaaaaaggaaaaaatg

SEQ ID NO: 279 - DNA, 33 bp, Homo sapiens
  source 1..33: mol_type = other DNA
gggccttcctgcaacctttgcggctccaacatg

SEQ ID NO: 280 - DNA, 270 bp, Homo sapiens
  source 1..270: mol_type = other DNA
gcttctttgcagcgcttcagcgttttcccctggagggcgcctccatccttggaggcctagtgccgtcggagagagagcgggagccgcggacagagacgcgtgcgcaattcggagccgactctgggtgcggactgtgggagctgactctgggtagccggctgcgcgtggctggggaggcgaggccggacgcacctctgtttgggggtcctcagagattaatgattcatcaagggatagttgtacttgtctcgtgggaatcacttcatcatg

SEQ ID NO: 281 - DNA, 37 bp, Homo sapiens
  source 1..37: mol_type = other DNA
ctgccttcgccgctcgggccgcccgggggaaaacatg

SEQ ID NO: 282 - DNA, 237 bp, Homo sapiens
  source 1..237: mol_type = other DNA
ccgcctcctctaggccgccggccgcgaagcgctgagtcacggtgaggctactggacccacactctcttaacctgccctccctgcactcgctcccggcggctcttcgcgtcacccccgccgctaaggctccaggtgccgctaccgcagcgtgagtacctggggctcctgcaggggtccactagccctccatcctctacagctcagcatcagaacactctctttttagactccgatatg

SEQ ID NO: 283 - DNA, 109 bp, Homo sapiens
  source 1..109: mol_type = other DNA
ccttccttacttccggttctctatggtgcgcgggcaagctttgctccgcctccggcagtggcttactcccggtgccaggttcttggagctgtgaggaggaacaaccatg

SEQ ID NO: 284 - DNA, 112 bp, Homo sapiens
  source 1..112: mol_type = other DNA
gggcctttgcaaaattgccctagtaacggccgcatggtaactcaggcgccgggcgcactgtcctagctgctggttttccacgctggttttagctcccggcgtctgcaaaatg

SEQ ID NO: 285 - DNA, 153 bp, Homo sapiens
  source 1..153: mol_type = other DNA
tttcctttttagttgactgaaacaaaacaaaacaaaagggccactggatgtctgccttcttggggggtgagccagacagactgacaaacaaacagccccaactgtgttcgggggagggtttcgcctcccgttttgcccggcagcagcagcatg

SEQ ID NO: 286 - DNA, 250 bp, Homo sapiens
  source 1..250: mol_type = other DNA
gctccccttttgccttcaaccttcgagccgccacgtaatgccacgtccccgcgcatgcgcatcttggccgctgctggcggctgtttccgggcttagagggctggagtggccgccgagttggaggcggtggtggcagcagtaggagtgtgtagagtgcgggattgggggccaggccctgcggagggcgggggaagttgtcttcttttttttccggaggggccggtaaacctggtggctgaacggcaagatg

SEQ ID NO: 287 - DNA, 171 bp, Homo sapiens
  source 1..171: mol_type = other DNA
cccccttttggcccctgcctttggagaaagtggagtgtggcgcttggttgtcgttatttcttcggactgcttcgcggtgcacggattcagcttctgcccagtggggctttcagctgtttgcgcgtctctctgtccccctcccctccccccggcacacctctgtctacgatg

SEQ ID NO: 288 - DNA, 145 bp, Homo sapiens
  source 1..145: mol_type = other DNA
gcttcttccgctttctcgtcaggctcctgcgccccaggcatgaaccaaggtttctgaactactgggcgggagccaacgtctcttctttctcccgctctggcggaggctttgtcgctgcgggctgggccccagggtgtcccccatg

SEQ ID NO: 289 - DNA, 152 bp, Homo sapiens
  source 1..152: mol_type = other DNA
ggctccttcctttccgtctctggccggctgggcgcgggcgactgctggcgaggcgcgtgggaccttacgctggttccccttcgtctcctctcccggcccgggccactagagagttcgctgacgccgggtgagctgagcctgccgccaagatg

SEQ ID NO: 290 - DNA, 109 bp, Homo sapiens
  source 1..109: mol_type = other DNA
gtttcctcttttcctggtttctcaagagtgctgctgctaacgcggtccccggcacgcaccatctgttgccatcccggccggccgaggccattgcagattttggaagatg

SEQ ID NO: 291 - DNA, 26 bp, Homo sapiens
  source 1..26: mol_type = other DNA
ccgcctccttctttctcgacaagatg

SEQ ID NO: 292 - DNA, 47 bp, Homo sapiens
  source 1..47: mol_type = other DNA
cgctctctggccgggcttgggctgcgtggagaatactttttgcgatg

SEQ ID NO: 293 - DNA, 33 bp, Homo sapiens
  source 1..33: mol_type = other DNA
gtttctctttcttcctgtctgcttggaaagatg

SEQ ID NO: 294 - DNA, 55 bp, Homo sapiens
  source 1..55: mol_type = other DNA
aaaccttttccggtcttactcacgttgcggccttcctcgcgtcacagccgggatg

SEQ ID NO: 295 - DNA, 36 bp, Homo sapiens
  source 1..36: mol_type = other DNA
ctccctctcacacacgctcacacccggctcgagatg

SEQ ID NO: 296 - DNA, 846 bp, Homo sapiens
  source 1..846: mol_type = other DNA
ccgcctctctccgccccgggtcgctgccgcctccgccgctttcgggcttcgcagcctgaggaaaaaaagagaaaaagataaaaaaaatctgaaaacgcttcaaaatcctgaaaaaaaaaaaggaaaagaaaaaacgaatcctcggagaacccgcggggaagtcactttcgtacgcttccggcctgccccgcgcccgccgccgcagcgcttggcgtccgtcggtctccgtccgtcggtccgggggtgagccgcccgcccggcccgccgtgccctccccccgctcgggccccgagccccgcgccccgcgcctgccccggcgcaccacgtgtccgtgctgcccttcgccgcccgcccggggctcgccgagtcggcgcccacaaagatttggtttccctctgccccggcggttgtaatcttaaaccgccggagcccgaggcctatatttatagagaaacgcgtgtccccgaggccgccgtgggcagcgtccggtcgcctcttaaaggatttttacccttcggaaggggattccccgtttaatttttttcctactttgattttttgaaatttggagcttcgcaccaggaccgcggagaagtgcaaagtcgcggggagggccgtattgtgcggagagccttttgtctgcggtgctgcggccgtgggagccggcccccgcctcccgtttccgtcccgtctccaagcccgccgactccagctcgtcctcgccgcgccggtgccacctgtgagccgcggcgcgggcccgggctccgaaggcgcccctttgtcctgcggcgggcccgataagaagtcctcctggcggggctcggggtggtggggggcggggagatg

SEQ ID NO: 297 - DNA, 252 bp, Homo sapiens
  source 1..252: mol_type = other DNA
agctctttcgcggcgctacggcgttggcaccagtctctagaaaagaagtcagctctggttcggagaagcagcggctggcgtgggccatccggggaatgggcgccctcgtgacctagtgttgcggggcaaaaagggtcttgccggcctcgctcgtgcaggggcgtatctgggcgcctgagcgcggcgtgggagccttgggagccgccgcagcagggggcacacccggaaccggcctgagcgcccgggaccatg

SEQ ID NO: 298 - DNA, 147 bp, Homo sapiens
  source 1..147: mol_type = other DNA
ctttcttttctccaagacgggctgaggattgtacagctctaggcggagttggggctcttcggatcgcttagattctcctctttgctgcatttccccccacgtcctcgttctcccgcgtctgcctgcggacccggagaagggagaatg

SEQ ID NO: 299 - DNA, 210 bp, Homo sapiens
  source 1..210: mol_type = other DNA
tggtcttctctcccgcggcgctggggcccgcgctccgctgctgttgctccattcggcgcttttctggcggctggctcctctccgctgccggctgctcctcgaccaggcctccttctcaacctcagcccgcggcgccgacccttccggcaccctcccgccccgtctcgtactgtcgccgtcaccgccgcggctccggccctggccccgatg

SEQ ID NO: 300 - DNA, 75 bp, Homo sapiens
  source 1..75: mol_type = other DNA
ttttctttctttcttagctgttagctgagaggaagtctctgaacaggcggcagcggctcttatagtgcaaccatg

SEQ ID NO: 301 - DNA, 72 bp, Homo sapiens
  source 1..72: mol_type = other DNA
gatcctttttgtcccctactgcgtgcggtggcagcttccttgcggaagtggtgaccgtgagagaagaagatg

SEQ ID NO: 302 - DNA, 133 bp, Homo sapiens
  source 1..133: mol_type = other DNA
gtttcctttcgctgatgcaagagcctagtgcggtggtgggagaggtatcggcaggggcagcgctgccgccggggcctggggctgacccgtctgacttcccgtccgtgccgagcccactcgagccgcagccatg

SEQ ID NO: 303 - DNA, 156 bp, Homo sapiens
  source 1..156: mol_type = other DNA
cctcccctctccgcctaagcctgccctatgccagccgggtgtcctccccacagcaccacggcttctcttcctcagcacggcgacaggggcttccccttcgccgccgccgccgccgccggccaagctccgccgcgcccgcggcccgcggccgccatg

SEQ ID NO: 304 - DNA, 91 bp, Homo sapiens
  source 1..91: mol_type = other DNA
cgcccccttctgcgcggtcacgccgagccagcgcctgggcctggaaccgggccgtagcccccccagtttcgcccaccacctccctaccatg

SEQ ID NO: 305 - DNA, 578 bp, Homo sapiens
  source 1..578: mol_type = other DNA
ctccctttcttaaatgcttggggtgagagagaagagaggctagggtggggcatggaggacacagagagagagagtgctgtgtattccttccccgctactgtcctgtcctcagctaacttgctctgggacagcttccccagggctacagatactgcactcagctgactgtcctttcttctgggcccctggtcccagagcagagctgacaaaggagattcctgagagagcaccttcttatcacagaaagtgctgagccaagagctcctagctgccccttttgcagatgtgaagggccagtgaaccttggacccagatggttgcttaatactcctttccccctccctcactccttcctttgcgggctgcctcacctcctccacccttcttgcttaaatccataggcatttgtctggccttcccttttactgctggctgggaaggaggagcatcagaccacagatcctggaaggcacttctctccctgactgctgctcacactgccgtgagaacctgcttatatccaggaccaaggaggcaatgccaggaagctggtgaagggtttcctctcctccaccatg

SEQ ID NO: 306 - DNA, 89 bp, Homo sapiens
  source 1..89: mol_type = other DNA
ctcccttttctcctcaagtcctgaagttgagtttgagaggcgacacggcggcggcggccgcgctgctcccgctcctctgcctccccatg

SEQ ID NO: 307 - DNA, 74 bp, Homo sapiens
  source 1..74: mol_type = other DNA
agccctcctacctgcgcacgtggtgccgccgctgctgcctcccgctcgccctgaacccagtgcctgcagccatg

SEQ ID NO: 308 - DNA, 86 bp, Homo sapiens
  source 1..86: mol_type = other DNA
ccttctttgcggctcggccattttgtcccagtcagtccggaggctgcggctgcagaagtaccgcctgcggagtaactgcaaagatg

SEQ ID NO: 309 - DNA, 217 bp, Homo sapiens
  source 1..217: mol_type = other DNA
cggccccttcggctccgagctgaccctgatcagggccgagttgtctcggcggcgctgccgaggcctccacccaggacagtccccctccccgggcctctctcctcttgcctacgagtcccctctcctcgtaggcctctcggatctgatatcgtggggtgaggtgagcaggcccggggagggtggttaccgctgaggagctgcagtctctgtcaagatg

SEQ ID NO: 310 - DNA, 71 bp, Homo sapiens
  source 1..71: mol_type = other DNA
agctctcttcttgcttggcagctggaccaagggagccagtcttgggcgctggagggcctgtcctgaccatg

SEQ ID NO: 311 - DNA, 479 bp, Homo sapiens
  source 1..479: mol_type = other DNA
ttttcttcttcgtcagcctcccttccaccgccatattgggccactaaaaaaagggggctcgtcttttcggggtgtttttctccccctcccctgtccccgcttgctcacggctctgcgactccgacgccggcaaggtttggagagcggctgggttcgcgggacccgcgggcttgcacccgcccagactcggacgggctttgccaccctctccgcttgcctggtcccctctcctctccgccctcccgctcgccagtccatttgatcagcggagactcggcggccgggccggggcttccccgcagcccctgcgcgctcctagagctcgggccgtggctcgtcggggtctgtgtcttttggctccgagggcagtcgctgggcttccgagaggggttcgggctgcgtaggggcgctttgttttgttcggttttgtttttttgagagtgcgagagaggcggtcgtgcagacccgggagaaagatg

SEQ ID NO: 312 - DNA, 540 bp, Homo sapiens
  source 1..540: mol_type = other DNA
tctcctcttcttcctttgtgtgtgcgcgagcggagttggggcggagggagaagggggaggtcgctctgtctgtccgtctcccgccgcctctgcccggtctactcgaagtgcggcgggagaggcgggagcccaggagagggtgcgggagctggcggggcggctcggagctgccaggacgccctggtcccagccgcgcacaggggagcgtggacggcagaggggctcggcgggagccgagatccgcccgtcccggctgcccctcggcctccctctgctcccacctaccccctgacacccatagaaaagcgtgcaaaggcgcggagcgggacggaaaccacaaataaatagcggcggcggcagcgcgtcatctggtggagcaggaagtgcaggcagagtccggaggctggtgctttctgcgcgtccccaggactttgccatgggctgggggccgcggaggctgcgagcggccgggcgagggcagcggcggcggcgtccgcaccggggctgagcgagcagcgacgcgaggggcgcgcggagatg

SEQ ID NO: 313 - DNA, 466 bp, Homo sapiens
  source 1..466: mol_type = other DNA
gggcctccttgaggaccccgggctgggcgccgccgccggttcgtctactctttccttcagccgcctcctttcaaccttgtcaacccgtcggcgcggcctctggtgcagcggcggcggctcctgttcctgccgcagctctctccctttcttacctccccaccagatcccggagatcgcccgccatggctttacttactgcggccgcccggctcttgggaaccaaggcacccagtggcaagtactagctgagcatttgggagatgcttgtcttacttggctgttgcttctcctgctgctggggaaaaggaatgcatcttgtcttgttcttgcagcccggcatgccagtgcttcctccacgaatttgaaagacatattggctgacctgatacctaaggagcaggccagaattaagactttcaggcagcaacatggcaagacggtggtgggccaaatcactgtggacatg

SEQ ID NO: 314 - DNA, 114 bp, Homo sapiens
  source 1..114: mol_type = other DNA
atttcttttcaagtcaattgaactgaaatctccttgttgctttgaaatcttagaagagagcccactaattcaaggactcttactgtgggagcaactgctggttctatcacaatg

SEQ ID NO: 315 - DNA, 68 bp, Homo sapiens
  source 1..68: mol_type = other DNA
cagtctccctcccttctggagacaccaccagatgggccagccagaggcagcagcagcctcttcccatg

SEQ ID NO: 316 - DNA, 54 bp, Homo sapiens
  source 1..54: mol_type = other DNA
cgctctccgcctcgcttgctcctgccgggcgtgcagggccccgccgccgccatg

SEQ ID NO: 317 - DNA, 180 bp, Homo sapiens
  source 1..180: mol_type = other DNA
catcctttccctgcggaggaccagggcaagtttcctgcctgcacggcacaggagagcaaacttctacagacagaccaaggcttccatttgctgctgacacatggaactgaggtgaaattgtgctccatgattttacagatttcataacgtttaagagacgggactcaggtcatcaaaatg

SEQ ID NO: 318 - DNA, 15 bp, Homo sapiens
  source 1..15: mol_type = other DNA
cgtcctctcagcatg

SEQ ID NO: 319 - DNA, 247 bp, Homo sapiens
  source 1..247: mol_type = other DNA
ttacctctttttcttgtctctcgtcaggtctctgacattgacagagcctggacgttggaggaagccccaggacgttggaggggtaaagtaaaagtccacagttaccgtgagagaaaaaagagggagaaagcagtgcagccaaactcggaagaaaagagaggaggaaaaggactcgactttcacattggaacaaccttctttccagtgctaaaggatctctgatctggggaacaacaccctggacatg

SEQ ID NO: 320 - DNA, 72 bp, Homo sapiens
  source 1..72: mol_type = other DNA
cgctctttctcccttcagcagccagccagctctgtgtcagggtcggggggtgcagaaagtcaggacagaatg

SEQ ID NO: 321 - DNA, 161 bp, Homo sapiens
  source 1..161: mol_type = other DNA
gttcctcttttcctcggttcccagtgttctggcaggtaaggaacgccggctcttcgcctctcagcgcggcttgtcctttgttccggacgcccgctcctcagccctgcggctcctggggtcgctgctgcatcccgcacgcctccaccggctgcagacccatg

SEQ ID NO: 322 - DNA, 78 bp, Homo sapiens
  source 1..78: mol_type = other DNA
cgctccctcccggtgccggcttctctgagtcaccaacctgaggctgccccggccgcctgcgcacccggcagcaccatg

SEQ ID NO: 323 - DNA, 59 bp, Homo sapiens
  source 1..59: mol_type = other DNA
agctctttgccgtcggagcgcttgtttgctgcctcgtactcctccatttatccgccatg

SEQ ID NO: 324 - DNA, 118 bp, Homo sapiens
  source 1..118: mol_type = other DNA
cttccttctttcctcccttgccagtccgcctgtcttcctccccgtcttccctgcccggcctcccccttcttcccccgctggccccctccccggagggataatatggtctccggcgatg

SEQ ID NO: 325 - DNA, 182 bp, Homo sapiens
  source 1..182: mol_type = other DNA
ccaccttcttttcatttctagtgagacacacgctttggtcctggctttcggcccgtagttgtagaaggagccctgctggtgcaggttagaggtgccgcatcccccggagctctcgaagtggaggcggtaggaaacggagggcttgcggctagccggaggaagctttggagccggaagccatg

SEQ ID NO: 326 - DNA, 96 bp, Homo sapiens
  source 1..96: mol_type = other DNA
cattcctttctttcgattacccgtggcgcggagagtcagggcggcggctgcggcagcaagggcggcggtggcggcggcggcagctgcagtgacatg

SEQ ID NO: 327 - DNA, 152 bp, Homo sapiens
  source 1..152: mol_type = other DNA
gagtcttttcagcgctgaggactggcgctgaggaggcggcggtggctcccggggcgtttgagcgggctcacccgagcccgcgggccaacgcggatccaggcccgactggcgggaccgccccggattccccgcgggccttcctagccgccatg

SEQ ID NO: 328 - DNA, 28 bp, Homo sapiens
  source 1..28: mol_type = other DNA
atttctcctccccctcccggccaagatg

SEQ ID NO: 329 - DNA, 192 bp, Homo sapiens
  source 1..192: mol_type = other DNA
ggtcctctctcggctcctcgcggctcgcggcggccgacggttcctgggacacctgcttgcttggcccgtccggcggctcagggcttctctgctgcgctcccggttcgctggacgggaagaagggctgggccgtcccgtcccgtccccatcggaaccccaagtcgcgccgctgacccgtcgcagggcgagatg

SEQ ID NO: 330 - DNA, 23 bp, Homo sapiens
  source 1..23: mol_type = other DNA
ctaccttccttctagcagaaatg

SEQ ID NO: 331 - DNA, 268 bp, Homo sapiens
  source 1..268: mol_type = other DNA
cggcccttcctccgccttctgggcggagcccgcgcgggatccgggtggctgcaggctgctggcttctgcggctgcggggtcggggtcgcggccagggccaagccgcagcgagttcacaggcggaacccctgcaggcggcgccccctacgcgaggtcacccctgggaaggagcgcagcccacccggcccctccgcatccgagcaggacgcccgtctcctctccctgaggatttcaggtctccctgtcccaggaggcttgtgccaagatg

SEQ ID NO: 332 - DNA, 34 bp, Homo sapiens
  source 1..34: mol_type = other DNA
tcttctctcggttcctctttcctcgctcaagatg

SEQ ID NO: 333 - DNA, 56 bp, Homo sapiens
  source 1..56: mol_type = other DNA
ggctcttctttgcctctgctggagtccggggagtggcgttggctgctagagcgatg

SEQ ID NO: 334 - DNA, 68 bp, Homo sapiens
  source 1..68: mol_type = other DNA
ttttcctttagtcaggaaggacgttggtgttgaggttagcatacgtatcaaggacagtaactaccatg

SEQ ID NO: 335 - DNA, 81 bp, Homo sapiens
  source 1..81: mol_type = other DNA
gcttctcttttccttggcggaggagggagaccacagagccctgggttgtggaagaggtggctgttccctgtcatcagtatg

SEQ ID NO: 336 - DNA, 292 bp, Homo sapiens
  source 1..292: mol_type = other DNA
cccccttcccccgcctttcttccctccgcgacccgggccgtgcgtccgtccccctgcctctgcctggcggtccctcctcccctctccttgcacccatacctctttgtaccgcaccccctggggacccctgcgcccctcccctcccccctgaccgcatggaccgtcccgcaggccgctgatgccgcccgcggcgaggtggcccggaccgcagtgccccaagagagctctaatggtaccaagtgacaggttggctttactgtgactcggggacgccagagctcctgagaagatg

SEQ ID NO: 337 - DNA, 261 bp, Homo sapiens
  source 1..261: mol_type = other DNA
gagcctttctggggaagaactccaggcgtgcggacgcaacagccgagaacattaggtgttgtggacaggagctgggaccaagatcttcggccagccccgcatcctcccgcatcttccagcaccgtcccgcaccctccgcatccttccccgggccaccacgcttcctatgtgacccgcctgggcaacgccgaacccagtcgcgcagcgctgcagtgaattttccccccaaactgcaataagccgccttccaaggccaagatg

SEQ ID NO: 338 - DNA, 243 bp, Homo sapiens
  source 1..243: mol_type = other DNA
gcgcctcttaggcttggcggtggcggcggcggcagcttcgcgccgaatccccggggagcggcggtggcggcgtcctggggccaggaggagcgaacacctgccgcggtcctcccgccggcgctgggctctgtgtgctccgggatggagcaggtgtgcagagggtgagaacccagctctgggaccaagtcacttgcttccttacttagcaagactatcgacttgagcaaacttggacctgggatg

SEQ ID NO: 339 - DNA, 526 bp, Homo sapiens
  source 1..526: mol_type = other DNA
ccccctcttttggttacagacgtgagggctctttggagacgtaaacatctccgagtggcgagggtgggcggggctgggcttgggaaagggcggggtggcttgcttgaggtgtggaaagaccagaagaaggtgaggtcaagagagtgcagaatgaggcattccaatggtgggtgggccctgacctgagagagtggcgcggggaggggtgaaagcgcggcgatcctggaacgccagcgggcgttgcggcctatgcgcgaggggcggggcgattaggtcatagagcggctcccagcgttccctgcggcgtaggaggcggtccagactataaaagcggctgccggaaagcggccggcacctcattcatttctaccggtctctagtagtgcagcttcggctggtgtcatcggtgtccttcctccgctgccgcccccgcaaggcttcgccgtcatcgaggccatttccagcgacttgtcgcacgcttttctatatacttcgttccccgccaaccgcaaccattgacgccatg

SEQ ID NO: 340 - DNA, 251 bp, Homo sapiens
  source 1..251: mol_type = other DNA
gctcctctgcgcccttgccgccctccgagccacagctttcctcccgctcctgcccccggcccgtcgccgtctccgcgctcgcagcggcctcgggagggcccaggtagcgagcagcgacctcgcgagccttccgcactcccgcccggttccccggccgtccgcctatccttggccccctccgctttctccgcgccggcccgcctcgcttatgcctcggcgctgagccgctctcccgattgcccgccgacatg

SEQ ID NO: 341 - DNA, 78 bp, Homo sapiens
  source 1..78: mol_type = other DNA
cttcctttcgcggggtcctccgtagttctggcacgagccaggcgtactgacaggtggaccagcggactggtggagatg

SEQ ID NO: 342 - DNA, 357 bp, Homo sapiens
  source 1..357: mol_type = other DNA
gctcctcctcgtcccagcgctagcgggcacgcggttcctttttgcgagctttccgagtgccaggcgccggccggctgcgaagacgcggtgggccgcccctccgattgaaatcacagaagatattcgtgttcttcttaagagaaaaagaggacattttagctttctcagttgaaggcgtactttattgtcggcttccaaagattactaacttttatctgtatcactaagattgaactgccttggctgtactgctattcttactgctgcttctattattgccttcttcagcacaataaggctttcaaaagccaaagaataacaagaaataagcaccattttagaagcctttccactatg

SEQ ID NO: 343 - DNA, 86 bp, Homo sapiens
  source 1..86: mol_type = other DNA
tggtccttttcaacggttttcacagatccagtgacccacgctctgaagacagaattagctaactttcaaaaacatctggaaaaatg

SEQ ID NO: 344 - DNA, 303 bp, Homo sapiens
  source 1..303: mol_type = other DNA
ctgcctctccaggcaacgcgggaggcccagcgggaaggcaggaggcggcggcggaggaggagctctactgagccgcaactgtggcgacagcaaccggagtcgcagccgccgccacctgcacctggcgcctagcccacgtccagcgcctgcccggccgccgcttcccgccaccctgccctgcccacccgccaggtactaccattaaagataccttcttctcagcaaatctatgataaaaaatataagtaacagaagaagaaataactgttatttgtcaagtgacaagcttttaatgtcagaatg

SEQ ID NO: 345 - DNA, 107 bp, Homo sapiens
  source 1..107: mol_type = other DNA
acgtctcttgctcctcagggccactgccaggcttgccgagtcctgggactgctctcgctccggctgccactctcccgcgctctcctagctccctgcgaagcaggatg

SEQ ID NO: 346 - DNA, 78 bp, Homo sapiens
  source 1..78: mol_type = other DNA
acgcctcttcagttgtctgctactcagaggaaggggcggttggtgcggcctccattgttcgtgttttaaggcgccatg

SEQ ID NO: 347 - DNA, 146 bp, Homo sapiens
  source 1..146: mol_type = other DNA
gggtcttttttagcgccatctgctcgcggcgccgcctcctgctcctcccgctgctgctgccgctgccgccctgagtcactgcctgcgcagctccggccgcctggctccccatactagtcgccgatatttggagttcttacaacatg

SEQ ID NO: 348 - DNA, 115 bp, Homo sapiens
  source 1..115: mol_type = other DNA
cgctctctgatgcaacgccggaatcgcggaaaccgccggtgcacgttggagtcataagacggcgtcggtgttgcagtctgtgtccttggaggtgaccagggccactgcaggcatg

SEQ ID NO: 349 - DNA, 43 bp, Homo sapiens
  source 1..43: mol_type = other DNA
cgtccccttgggtccttgatcctgagctgaccgggtagccatg

SEQ ID NO: 350 - DNA, 35 bp, Homo sapiens
  source 1..35: mol_type = other DNA
ttctccttcccgcagtctgcagccggagtaagatg

SEQ ID NO: 351 - DNA, 91 bp, Homo sapiens
  source 1..91: mol_type = other DNA
catcctttacggcaggcgtccgcgtcgctagctagtcgttctgaagcggcggccagagaagagtcaagggcacgagcatcgggtagccatg

SEQ ID NO: 352 - DNA, 133 bp, Homo sapiens
  source 1..133: mol_type = other DNA
ccctcctttttaagcgcctcccgccagcctctgctgtggctcgcttcgccgcgctccctccttccccgccttccatacctccccggctccgctcggttcctggccaccccgcagcccctgcccaggtgccatg

SEQ ID NO: 353 - DNA, 146 bp, Homo sapiens
  source 1..146: mol_type = other DNA
ctcccttcgcgctccggacgggcgacggtagctcgagacccgggactccgcccgcctccccgcgagtatttgaggtccggggcggctccggcgcctctgcccgccgttctgctcgctcgctccccgctctggagtctgccatcatg

SEQ ID NO: 354 - DNA, 69 bp, Homo sapiens
  source 1..69: mol_type = other DNA
ttctctcctcagacttcaagggctaccactggacccttcccctgtcttgaaccctgagccggcaccatg

SEQ ID NO: 355 - DNA, 25 bp, Homo sapiens
  source 1..25: mol_type = other DNA
ctctctcctttccctgttagacatg

SEQ ID NO: 356 - DNA, 213 bp, Homo sapiens
  source 1..213: mol_type = other DNA
agttctctccgcacgcgggctggagaagcgggtcctacgcacgctttgttgtcgcgctttgcctccgtccttgcccctactcccgccttacctgacttccttttcggaggaagatccttgagcagccgacgttgggacaaaggatttggagaaacccagggctaaagtcacgtttttcctcctttaagacttacctcaacacttcactccatg

SEQ ID NO: 357 - DNA, 173 bp, Homo sapiens
  source 1..173: mol_type = other DNA
cgccctttctgtgcggcgcccgggcgcaacgcaaacatggcggcgggtggcacccgtcggtgaggcggtgccgggcgggggttgtcgggtgtcatgggcggtggcgacggcaccgcccccgcgtctccctgagcgggacggcagggggggcttctgcgctgagccgggcgatg

SEQ ID NO: 358 - DNA, 242 bp, Homo sapiens
  source 1..242: mol_type = other DNA
ctgccctttggacgcgcgcctcggttccgaacgcagcggacggcgcctcaggcagcgcggcggacagcccgtcctccggcgcgccgcgagcctcggaggaccctagcgacggtcgtggcgtaagaccggggggacgcggcggtagcggcggccgttgcgattgattgcgctggttgcctgcggcgtccacttccttggccgcccttgctacactggctgattgttgtgcagccggcgccatg

SEQ ID NO: 359 - DNA, 425 bp, Homo sapiens
  source 1..425: mol_type = other DNA
ccaccctttctcgaggctgtggcctccgcgagagccgagcgggccgcaccgccggccgtgcgactgccccagtcagacacgaccccggcttctagcccgcctaagcctgtttggggttgctgactcgtttcctccccgagtttcccgcgggaactaactcttcaagaggaccaaccgcagcccagagcttcgcagacccggccaaccagaggcgaggttgagagcccggcgggccgcggggagagagcgtcccatctgtcctggaaagcctgggcgggtggattgggaccccgagagaagcaggggagctcggcggggtgcagaagtgcccaggcccctccccgctggggttgggagcttgggcaggccagcttcacccttcctaagtccgcttctggtctccgggcccagcctcggccaccatg

SEQ ID NO: 360 - DNA, 185 bp, Homo sapiens
  source 1..185: mol_type = other DNA
ttccctccttcgtcgctgttgctgccgccatacgcgctctccctgtttagctcttctgttagaaatagtatctttgttttcctttgctgttcctcaatcccctactcttcaccccttgttttcacctattttgcgagaacccatccagatcccccttcccttcttcccctgccggcccagttatg

SEQ ID NO: 361 - DNA, 29 bp, Homo sapiens
  source 1..29: mol_type = other DNA
ccgccctttcgctcctcggccgcgcaatg

SEQ ID NO: 362 - DNA, 368 bp, Homo sapiens
  source 1..368: mol_type = other DNA
agctctttcccttttggtttgcaagcactgcctgtaaagccctcgcatgagaggccagcctgctagggaaatccaggaatctgcaacaaaaacgatgacagtctgaaatactctctggtgccaacctccaaattctcgtctgtcacttcagacccccactagttgacagagcagcagaatttcaactccagtagacttgaatatgcctctgggcaaagaagcagagctaacgaggaaagggatttaaagagtttttcttgggtgtttgtcaaacttttattccctgtctgtgtgcagaggggattcaacttcaatttttctgcagtggctctgggtccagccccttacttaaagatctggaaagcatg

SEQ ID NO: 363 - DNA, 65 bp, Homo sapiens
  source 1..65: mol_type = other DNA
ctcccttttcagtccgcgtccctccctgggccgggctggcactcttgccttccccgtccctcatg

SEQ ID NO: 364 - DNA, 62 bp, Homo sapiens
  source 1..62: mol_type = other DNA
ggtccttctctggggcggtcgcgttggcagcggatgcgggaagccggactctgggcgtcatg

SEQ ID NO: 365 - DNA, 136 bp, Homo sapiens
  source 1..136: mol_type = other DNA
cgccctctcagcaacccgcacagggcgcacccggacgctctaccgctcccgccgcagtcgccgggccatgggcctcgagcccgccccgaacccccgcgagcccgccttgtctgcggcgtgactggaggcccagatg

SEQ ID NO: 366 - DNA, 79 bp, Homo sapiens
  source 1..79: mol_type = other DNA
cgttcttttgttccggggccgcagggcggggcaggcccgactttcgccgtcttcttgtctactctccagaacggccatg

SEQ ID NO: 367 - DNA, 117 bp, Homo sapiens
  source 1..117: mol_type = other DNA
cttcctctccgcctccttcgcctagcctgcgagtgttctgagggaagcaaggaggcggcggcggccgcagcgagtggcgagtagtggaaacgttgcttctgaggggagcccaagatg

SEQ ID NO: 368 - DNA, 63 bp, Homo sapiens
  source 1..63: mol_type = other DNA
ctacctcttcctctccacgcggttgagaagaccggtcggcctgggcaacctgcgctgaagatg

SEQ ID NO: 369 - DNA, 404 bp, Homo sapiens
  source 1..404: mol_type = other DNA
tgctctctgccgcattgatagcagcgagagctggaggtgttgggtcgggagaccagccgttcgatcccgccgcaggtaggagctggtttccatcctggcaccacggcacacacctccagcctcgagcccggcgctgctgcccgggggtctccttcaggctctttgacgccgttccagggggcacctatccaggcatcctctgggcctctagccagaggactggctcccggcttcagcactccgggctgcagtaagaagtgcccttatcgctctgagccctgccaccatcccgtgaaccaccgaaaccctggtccagcgcgacagccttggacctgggactggacggatccaaaacgctcagcctcggccccccacagacggggctctgcatcgtctctgatatg

SEQ ID NO: 370 - DNA, 41 bp, Homo sapiens
  source 1..41: mol_type = other DNA
tgctcttcctgggctggctgtctcctgctcatccagccatg

SEQ ID NO: 371 - DNA, 152 bp, Homo sapiens
  source 1..152: mol_type = other DNA
ctgtctttctagcatgttgccctttttcaaccacatttgtgtttcaggtgtagagaggagagagagtgaacagggagcggggcttttgtctgttggtctccctggactgaagagagggagaatagaagcccaagactaagattctcaaaatg

SEQ ID NO: 372 - DNA, 55 bp, Homo sapiens
  source 1..55: mol_type = other DNA
gcttctctgctgaccctctctcgtcgccgctgccgccgccgcagctgccaaaatg

SEQ ID NO: 373 - DNA, 42 bp, Homo sapiens
  source 1..42: mol_type = other DNA
cctccttctgtttcccagaccgagagccgcgccggcaccatg

SEQ ID NO: 374 - DNA, 152 bp, Homo sapiens
  source 1..152: mol_type = other DNA
ccccctcttctccgcgtaggcccagctccctgaagcggctgtttcgagccacgcgcccatcgggtaccgaggcacgcgccgggcgtcacgtgcgtttcgcggcgagcggaaatgacgcgagttgtgtgagccgccagtatggccgggctatg

SEQ ID NO: 375 - DNA, 182 bp, Homo sapiens
  source 1..182: mol_type = other DNA
ctgtctctccccatccggggcagcggggaatggctgagccaggggttcgccgcccccgccgccgccgccgccgccgccgccgccgccgccgcccgctttcggctcgggcctcaggaccgtagcatcctgagacattttgaattgacacttctcaagatttgactggatcagagttcatcatg

SEQ ID NO: 376 - DNA, 106 bp, Homo sapiens
  source 1..106: mol_type = other DNA
cttcctttatctctggcggccttgtagtcgtctccgagactccccacccctccttccctcttgaccccctaggtttgattgccctttccccgaaacaactatcatg

SEQ ID NO: 377 - DNA, 118 bp, Homo sapiens
  source 1..118: mol_type = other DNA
gagcctctgtcggccgcggaagcctggagtgggcggtacgcagacgcgcgcggtgagacccgctgtctgctcagcggactctgcccgcccccacctccccctgcgtcgggccgacatg

SEQ ID NO: 378 - DNA, 179 bp, Homo sapiens
  source 1..179: mol_type = other DNA
caccctctttcagagtggtacatggaagacagcacaaagtggatccatactctgaaatgcagtaactctgatgcttgaatttgtctcccttcttgccagaaaggattctaataactcggtgtcaaagccaagacataaactcaaccccttctcttccaaaagcttcacgttacagcatg

SEQ ID NO: 379 - DNA, 92 bp, Homo sapiens
  source 1..92: mol_type = other DNA
gtacctttctcggggtgtctgcgtaactgcccagacttgccttggtttggtcagatgacacctcctctgggactggctagccagcgttcatg

SEQ ID NO: 380 - DNA, 185 bp, Homo sapiens
  source 1..185: mol_type = other DNA
tttcctctgctccgccgcggccggaggtatccgcatcggcgagctgcgtctcccgggtgtcggccccggcggctccccgaccgtgcccggctgtggcgaggcggctccagcccagcctgtggcagccgcgacccccggggcgctccggagcccactgcgcggcgcgcgtgccggctgcctgcatg

SEQ ID NO: 381 - DNA, 36 bp, Homo sapiens
  source 1..36: mol_type = other DNA
ctttcttccgccttaggaaggtggcggccagggatg

SEQ ID NO: 382 - DNA, 817 bp, Homo sapiens
  source 1..817: mol_type = other DNA
cggcccttttctcggggcgcccgagaggccagctcagacctcccggctcgacaggcggcgcgggcggcggtgagtgcggcgcggggacgccggggcgcggggaccagcgggagacagcggggggccggtggcgccagcacctgctgggggccccgggcactgagcccttggctggggcctcctgggatgccagggggcgcgggtcgggtcgcgggcatcgaggcgcggcggagggcgtgggggcccggccggggcggggtccggcctcccagcgctggtcccggccgcgtctccggttgggttcagctcctgcgtcccagagtggcccgatcgcgcgtggcggggtcgtccggcccccacccgaacgagcgcccttcgcggcccgccgcgtccccctccccggagaggacggcccctgggctttttagaaaaaggcgcgattctctctagtgactcaggttgagatttccagaaatatcccccgggggttcagaaacaaaaccaaaacaaacaaaaaaaccccaacgaattcccaaatgctatttgccaaacatttgacttctaggggcgcgggtacccgcgtttctctccctgcccccgcgacttcgcgcaagatccgggaaggacacccgaggcccctgggagaccctggggaggtgaaaatcagagagcgaagcgggccgtggcccctaggcctgacccctccccgcggggtaaggcgggcaccccgcgagcgcaggggtcctcttactgctgatggcacccagctctgggcccagacgccgctcaccgtccaccgccggtgctgggtaaaatg

SEQ ID NO: 383 - DNA, 264 bp, Homo sapiens
  source 1..264: mol_type = other DNA
ccaccccttcggctctgggccccgcctcgtggtgccggctggttcttcgcgctcgcccgacttcccagcggccccgtgcggcccgggcatgcccagtgcgggcgcagcggccccggccctggaagcgccccggcggagctggcctgcggtgggctaggggcagggccggagccgcggcggcggagctgtggatccttcatgatgagagatttggggacacttctctctcctgtgtgtagttgatagtttggtggtgaagagatg

SEQ ID NO: 384 - DNA, 64 bp, Homo sapiens
  source 1..64: mol_type = other DNA
tgacctttccgagttggctgcagatttgtggtgcgttctgagccgtctgtcctgcgccaagatg

SEQ ID NO: 385 - DNA, 91 bp, Homo sapiens
  source 1..91: mol_type = other DNA
attcctccgcgcgctgggacaggctgcttcttcgccagaaccaaccggttgcttgctgtcccagcggcgccccctcatcaccgtcgccatg

SEQ ID NO: 386 - DNA, 222 bp, Homo sapiens
  source 1..222: mol_type = other DNA
ctctcttccgcccggcggcccacaccggtcaggcccggcgcgggctgcgctctccagctgtggctatggccccagccccgagatgaggagggagagaactaggggcccgcaggcctgggaatttccgtcccccaccaagtccggatgctcactccaaagtctcagcaggcccctgagggagggagctgtcagccagggaaaaccgagaacaccatcaccatg

SEQ ID NO: 387 - DNA, 430 bp, Homo sapiens
  source 1..430: mol_type = other DNA
cgaccttcctgccgggccgggcggtccgaggctgctggagtgccgtgagcaggccgcgggaacgtcgccgtcaccttgtctcggggcctcggcgctgcttcccgccaaaacacgtttaccgcgcgcccgggcctcccaccttgcggaagggaccccaccaccacttggatttctgttgcaggttgagaacaaaaacatgcacctggagtttccccggagccctctgcgtggttgagcttcggtggaatttcggggctcttggctgccagccgcgcttgcctggtagcaacagaaaccagtcctgctcgcctccgtggacatttcattaccatccagaagtgtctcccactgaaggcatccgtggttgtttttaagccacaaaaaagccacacccaagatcacctgacacccaccctgacaagtgtccatg

SEQ ID NO: 388 - DNA, 184 bp, Homo sapiens
  source 1..184: mol_type = other DNA
ccgcccctttccctcgccttcggctgacgctgacgtcggatgagtgatccggagggacgctccgaccgcggccgggaggctcctgggggccggggctccgaggttataatataacttatcctctcatgcttttttcctgccccttctccccaaatcatcaacaatagaagaagaagaaaacatg

SEQ ID NO: 389 - DNA, 57 bp, Homo sapiens
  source 1..57: mol_type = other DNA
gtgtctctgtgggcggccgccgggttgagctgcggcacacgtgcgacggccgtgatg

SEQ ID NO: 390 - DNA, 31 bp, Homo sapiens
  source 1..31: mol_type = other DNA
gtttcttttagtttccggtgtctctgcaatg

SEQ ID NO: 391 - DNA, 330 bp, Homo sapiens
  source 1..330: mol_type = other DNA
cggcctctgtctcctccccctcccgcccttacctccacgcgggaccgcccgcgccagtcaactcctcgcactttgcccctgcttggcagcggataaaagggggctgaggaaataccggacacggtcacccgttgccagctctagcctttaaattcccggctcggggacctccacgcaccgcggctagcgccgacaaccagctagcgtgcaaggcgccgcggctcagcgcgtaccggcgggcttcgaaaccgcagtcctccggcgaccccgaactccgctccggagcctcagccccctggaaagtgatcccggcatccgagagccaagatg

SEQ ID NO: 392 - DNA, 22 bp, Homo sapiens
  source 1..22: mol_type = other DNA
cggcctttgcggttccaacatg

SEQ ID NO: 393 - DNA, 273 bp, Homo sapiens
  source 1..273: mol_type = other DNA
tagccttttcaaaaggcgcagcttaccgcggtgcgcgcggattctggacttgggcgccaactcgtagtccacgctccccggggtcagcagaggggcgctcacgctctcgccacccacctcgctttctcaccccgcgcttcccggcctgggtttttagtcttccttggagcgctctctggcctccgcctccgccagggagcggaaggcggagacagcgagactggccaggggggaggaaagaggacgcgtgtgggcaagggggacaacgggatg

SEQ ID NO: 394 - DNA, 81 bp, Homo sapiens
  source 1..81: mol_type = other DNA
cgacctttcccctctgcgacagtttcccgaggtacctagtgtctgagcggcacagacgagatctcgatcgaaggcgagatg

SEQ ID NO: 395 - DNA, 311 bp, Homo sapiens
  source 1..311: mol_type = other DNA
ggtcctctgcgccctggcagccaggagtcgccgccacgaccgccgggtctcagtgggtgcctgcgccttctccccgcccgcctgccccgggccatccagaaacttgctctacccgccgcgggtgctcggcagtgctgcccatggcccagcccaggagcctatttagggcgccggacgggctggacagaggcgcggctcagtaattgaaggcctgaaacgcccatgtgccactgactaggaggcttccctgctgcggcacttcatgacccagcggcgcgcggcccagtgaagccaccgtggtgtccagcatg

SEQ ID NO: 396 - DNA, 121 bp, Homo sapiens
  source 1..121: mol_type = other DNA
ctgtctcttgtaggcagggatcacagtctgaaacgacagcaaggaagaggtaggcagggaaaactaactggaaggaagtttaaatacagaaagagcaaagtattatctaactataacaatg

SEQ ID NO: 397 - DNA, 190 bp, Homo sapiens
  source 1..190: mol_type = other DNA
cttcctccagggtctggagaacccagaggcagctcctcctgagtgctgggaaggactctgggcatcttcagcccttcttactctctgaggctcaagccagaaattcaggctgcttgcagagtgggtgacagagccacggagctggtgtccctgggaccctctgcccgtcttctctccactccccagcatg

SEQ ID NO: 398 - DNA, 91 bp, Homo sapiens
  source 1..91: mol_type = other DNA
cgctcttcctggttgggccctgccctgagctgccaccgggaagccagcctcagggactgcagcgacccccaaacacccctcccccaggatg

SEQ ID NO: 399 - DNA, 148 bp, Homo sapiens
  source 1..148: mol_type = other DNA
cttcctttcgccgtcgccgccgcggagcggagtcgagccgagctgatttgatcgaggagcgcggttaccggacgggctgggtctatggtcgctccgcgggccgctccgccggctggtgcttttttatcagggcaagctgtgttccatg

SEQ ID NO: 400 - DNA, 81 bp, Homo sapiens
  source 1..81: mol_type = other DNA
cttcctccctagtcgcggggagtctgagaaagcgcgcctgtttcgcgaccatcacgcacctcccctccgcttgtggccatg

SEQ ID NO: 401 - DNA, 293 bp, Homo sapiens
  source 1..293: mol_type = other DNA
cctccttcctcgccgccggggcgccctctcggtgccactggctctcacgtgccagtagcccaccccgcatcatcctctcgcctcgctcctggagggaagtgactatatctcccccgtccgccttccatcgccgccgcggcggtaattctgtcgggcccgcccgctgacgtcacctgctagccccgcctcctctagggtcccgggcccctgcggcgggggctgccccggggggcagtcagttgaggcggcgggagctcggcggagggcgggccaggtgactggtccgggccatg

SEQ ID NO: 402 - DNA, 401 bp, Homo sapiens
  source 1..401: mol_type = other DNA
aggcctttttgtgtcctgtttgctaaaggcatgcgggctacagcattcaagagagggagtcgttaacaaagggaaagagataaatgtaaataagctcacatttacagaatgagcggtttgcagtaaaaagctgcggcagcccagagtctgctactttaggctgggctaacctttccctgtaaaaaaaaaaaaaaaaaaaaaaaaaaaaaaatggataaaaatatgcacttccaaagggcgagttgcccatttacatgtttattagctaattatctacaggcatcagcacattctctcatctagcacactctttcttggggaggaaaatatttcctaccggtccatagtgtcagagtggtgaacccctgcagccagcaggcctcctgaaaaaaaagtccatg

SEQ ID NO: 403 - DNA, 188 bp, Homo sapiens
  source 1..188: mol_type = other DNA
gctcctctttgcagagggggaaactcttgggctgagagcaggaataatgcggtaggcaaggcgggctgctggctcccccggctccggcagcagcggcggcagcccgagcagcggcagcagcagcggcagcaccccaggcgctgacagccccgccggccggctccgttgctgaccgccgactgtcaatg

SEQ ID NO: 404 - DNA, 187 bp, Homo sapiens
  source 1..187: mol_type = other DNA
agccctttctgtccctcccagtgaggccagctgcggtgaagagggtgctctcttgcctggagttccctctgctacggctgccccctcccagccctggcccactaagccagacccagctgtcgccattcccacttctggtcctgccacctcctgagctgccttcccgcctggtctgggtagagtcatg

SEQ ID NO: 405 - DNA, 36 bp, Homo sapiens
  source 1..36: mol_type = other DNA
gggtctcctcgctgtcgccgccgctgccacaccatg

SEQ ID NO: 406 - DNA, 198 bp, Homo sapiens
  source 1..198: mol_type = other DNA
tcttctcctttaccaagatggcggcttgtccctgtttcgccacagttcctaccttatgagctcggttttcttatgcttataagagtggaacagcaaaagctggcaggctgacagaggcggcctcaggacggaccttctggctactgaccgttttgctgtggttttcccggattgtgtgtaggtgtgagatcaaccatg

SEQ ID NO: 407 - DNA, 58 bp, Homo sapiens
  source 1..58: mol_type = other DNA
gttcctcccttcttccgagcctctcctctggccgccgcgcgggagagaggccgagatg

SEQ ID NO: 408 - DNA, 183 bp, Homo sapiens
  source 1..183: mol_type = other DNA
ctacctttttcgagagtgactcccgttgtcccaaggcttcccagagcgaacctgtgcggctgcaggcaccggcgcgtcgagtttccggcgtccggaaggaccgagctcttctcgcggatccagtgttccgtttccagcccccaatctcagagcggagccgacagagagcagggaaccggcatg

SEQ ID NO: 409 - DNA, 148 bp, Homo sapiens
  source 1..148: mol_type = other DNA
cagtctttcgcctcagtctcgagctctcgctggccttcgggtgtacgtgctccgggatcttcagcacccgcggccgccatcgccgtcgcttggcttcttctggactcatctgcgccacttgtccgcttcacactccgccgccatcatg

SEQ ID NO: 410 - DNA, 218 bp, Homo sapiens
  source 1..218: mol_type = other DNA
ccgcccctttctttctcctcgccggcccgagagcaggaacacgataacgaaggaggcccaacttcattcaataaggagcctgacggatttatcccagacggtagaacaaaaggaagaatattgatggattttaaaccagagtttttaaagagcttgagaatacggggaaattaatttgttctcctacacacatagatagggtaaggttgtttctgatg

SEQ ID NO: 411 - DNA, 106 bp, Homo sapiens
  source 1..106: mol_type = other DNA
cagtctctcccagcgaccgccgcgggggcaaggcctggagctgtggttcgaatttgtgcaggcagcgggtgctggcttttagggtccgccgcctctctgcctaatg

SEQ ID NO: 412 - DNA, 581 bp, Homo sapiens
  source 1..581: mol_type = other DNA
agttctttccaactttttctcggcggagtgagcgcagcgggcgcagactcgggggcaggttgctgtgcttctccgggctcagccgcctgctctcctggctcaggtcctcggggagccctagacagacatcaagtggccactggcgctccttcccctcccagctgagccatcctccccggcctcctcgggcgggacagccccgtgcttaggtttttctccttttctcccccggtgcgcctctgctcggactctcgcgccgggatcgcggcggaaacctccctcccctttcgcctcctgcggctccttcccttcgcccctcctccgccagtcactggaatcaattccgtggggaatcggctccgccgccgcgaaggacagcctttccgcgcgggactccggggcgccacgggggccatgtaagcagctatcttccagagggccacactgggcatggacacccttttccctgcctggaggagcacaggtgatagtgtaattttccagtcacgaaactgctaaggccatctcaggggcgtgtgcgccaggataggcgggcggcgtccgaggaccacatagccatg

SEQ ID NO: 413 - DNA, 218 bp, Homo sapiens
  source 1..218: mol_type = other DNA
ctttcttttaagttgataacaatcagctcaggggtttgctctgcttgcaaggtcactgcaagaatgaacattgaactttggactatacctgaggggtgaggtaaacaacaggactataaatatcagagtgtgctgctgtggctttgtggagctgccagagtaaagcaaagagaaaggaagcaggcccgttggaagtggttgtgacaaccccagcaatg

SEQ ID NO: 414 - DNA, 103 bp, Homo sapiens
  source 1..103: mol_type = other DNA
agctcttctcgcgcatgcgttctccgaacggtcttcttccgacagcttgctgccctagaccagagttggtggctggacctcctgcgacttccgagttgcgatg

SEQ ID NO: 415 - DNA, 120 bp, Homo sapiens
  source 1..120: mol_type = other DNA
tttcctcttcctccccagcaccgacccacactgaccaacacaggctgagcagtcaggcccacagcatctgaccccaggcccagctcgtcctggctggcctgggtcggcctctggagtatg

SEQ ID NO: 416 - DNA, 29 bp, Homo sapiens
  source 1..29: mol_type = other DNA
cctcctttccccagcccgccgcggccatg

SEQ ID NO: 417 - DNA, 97 bp, Homo sapiens
  source 1..97: mol_type = other DNA
ggacctttcgcactcgggtcaggggtaaagcagcctgtcgcttgccgggcagctggtgagtcggtgacctggcctgtgaggagcagtgaggagaatg

SEQ ID NO: 418 - DNA, 175 bp, Homo sapiens
  source 1..175: mol_type = other DNA
gtgcctctgactgtccgggtccctccagcattttgcagctttctcctgtcttgaagaagtagaacggtgcccgagaaacgtttttccccttcgagactcaggaggatgaaagtcatcacttgtgaaatagcctggcacaacaaggagcccgtgtacagcctggacttccagcatg

SEQ ID NO: 419 - DNA, 87 bp, Homo sapiens
  source 1..87: mol_type = other DNA
agccccgccccgctcgctggcctgccctcctcttgctaccctcccggcgcagagaaccccggctgctcagcgcgctccgcggtcatg

SEQ ID NO: 420 - DNA, 65 bp, Homo sapiens
  source 1..65: mol_type = other DNA
tgccctcctcttgctaccctcccggcgcagagaaccccggctgctcagcgcgctccgcggtcatg

SEQ ID NO: 421 - DNA, 176 bp, Homo sapiens
  source 1..176: mol_type = other DNA
cagcctcctgccagcgcgctctctgtttctctgcagccccgaagctcgcgaatgtagcaggcgccccaagctcggtcctcaagaagccatggcggaatccaggggccgtctgtacctttggatgtgcttggctgctgcgctggcatctttcctgatgggatttatggtgggtaagt

SEQ ID NO: 422 - DNA, 46 bp, Homo sapiens
  source 1..46: mol_type = other DNA
ctgtctctttaacgcgagaggaagcgatgcagaggggtggaaaatg

SEQ ID NO: 423 - DNA, 163 bp, Homo sapiens
  source 1..163: mol_type = other DNA
cttccttttctgccttctctcctgctttctagctctgggctttcccagctccgaagtcaatactgagatcccagatgtgtccagagacatcctgaagaggctcgggggtggaggagccttagtgtgtccacaaagggactcctgaaactgactgagagccagt

SEQ ID NO: 424 - DNA, 20 bp, Homo sapiens
  source 1..20: mol_type = other DNA
ggccctctggcgctaccatg

SEQ ID NO: 425 - DNA, 81 bp, Homo sapiens
  source 1..81: mol_type = other DNA
cgcccttcccccacccgcttccggccgcggctcggttctcccgcctccgcctccgccgcggctcgtggttgtcccgccatg

SEQ ID NO: 426 - DNA, 67 bp, Homo sapiens
  source 1..67: mol_type = other DNA
ctccctccttgcagttggatccctggcgggtgcggcccggcccggcccgtgagcggcgcacagaatg

SEQ ID NO: 427 - DNA, 93 bp, Homo sapiens
  source 1..93: mol_type = other DNA
actcctcctttcccccgccccgcctccgttcggagagccggcgggcgggcgcctctcggccaggaagcgcctcttggacgcgtgtgaccgatg

SEQ ID NO: 428 - DNA, 248 bp, Homo sapiens
  source 1..248: mol_type = other DNA
aggcctcttctgaggctctaggtgccccagtagcagggccttctgcagcaaggccgggaactgctgcaccattggtgtgttttaccttaagggactccaggcagcttccttgctgggaagatattcatttgctggggtggggctgggggtgcagaggtaggaagtgctgtggctagaaggcggcctggccagcgagtaggtggtggagcgagtgagagcgtgtgcgctgtaaacagtgtgagtgcatg

SEQ ID NO: 429 - DNA, 930 bp, Homo sapiens
  source 1..930: mol_type = other DNA
aggcctcttctgaggctctaggtgccccagtagcagggccttctgcagcaaggccgggaactgctgcaccattggtgtgttttaccttaagggactccaggcagcttccttgctgggaagatattcatttgctggggtggggctgggggtgcagaggtaggaagtgctgtggctagaaggcggcctggccagcgagtaggtggtggagcgagtgagagcgtgtgcgctgtaaacagtgtgagtgcatgtgcgccagcgcgtgcaaggacacggtaagggatgtacatgtattgtctcgtgagtaagagcttgtgtgtgtgttgggatgggaagacacgtactggtatgagagcccgcgtgagaagtgtatgtgtgagtactcgcgtggaagttttgcactcgggtttgaggctgtgcaaaagtacgcatggctcaccaggtgtggggctgtgtgggctgcctcgtgtgtgccagcccgtgtgcaggcctgttttgtgagagccttcagggaacgcatgagcacgtgtgccagtgcgagtgcgggacgcggggaggcgggagagaccgagtgggaggccccgcgaaggagtgggagtgggagtgggagtgccggcgggagacctgcgggggcgcgcccgggctgacgcgtgcgcgccagtgcgcgtgagtgcgggcgcgcgccgccgccccccgccggggtcggagccggttgccatgggaacgcgccgcggcccgagttaatcatttcctgtggaaagtgtgcgggaggggcgcgagcgggctggccgaggaggaggcggcggcgtggagctgcctcctgccggcgggccgggccgggccgagccccgggcgctgcggcgacgcctggatcctgcctccgccaggccggctgcctggtgccccgaggaggctgctgagccccaggccatg

SEQ ID NO: 430 - DNA, 28 bp, Homo sapiens
  source 1..28: mol_type = other DNA
cctcctccgcgttccagaatccaagatg

SEQ ID NO: 431 - DNA, 263 bp, Homo sapiens
  source 1..263: mol_type = other DNA
cgttctctcccgcggaattcaggtttacggccctgcgggttctcagaggcaagttcagaccgtgttgttttcttttcacggatcctgccctttcttcccgaaaagaagacagccttgggtcgcgattgtggggcttcgaagagtccagcagtgggaatttctagaatttggaatcgagtgcattttctgacatttgagtacagtacccaggggttcttggagaagaacctggtcccagaggagcttgactgaccataaaaatg

SEQ ID NO: 432 - DNA, 383 bp, Homo sapiens
  source 1..383: mol_type = other DNA
cttccttctgcaacaggcgtgggtcacgctctcgctcggtctttctgccgccatcttggttccgcgttccctgcacagtaagtactttctgtgccgctactgtctatccgcagccatccgcctttctttcgggctaagccgccccggggactgagagttaaggagagttggaggctttactgggccacagggttcctactcgcccctgggcctccggacaaaatggggtctgcggttggtgtcctggcaaaagcagggtagaagggctgcggggcgggcccagaatccgagcctgcagagatgggagcagttgcagtgttgagggcggaagaggagtgcgtcttgttttgggaactgcttcacaggatccagaaaaggaaatg

SEQ ID NO: 433 - DNA, 181 bp, Homo sapiens
  source 1..181: mol_type = other DNA
cgcccttcgccgctgagctcgcagcctccggcgcccacctccacctccagtgtcccgcctcgggccgtcgccctccagcggctcgcgagcgtgggagacgtacctgggcaggcactgtccagcccaggcccaggcacagccgtgaggggcgaggcacggggacatcctggcggccaccatg

SEQ ID NO: 434 - DNA, 56 bp, Homo sapiens
  source 1..56: mol_type = other DNA
ccgcccctcccgcaacgctcgaccccaggattcccccggctcgcctgcccgccatg

SEQ ID NO: 435 - DNA, 170 bp, Homo sapiens
  source 1..170: mol_type = other DNA
ccctcttctttagactgccacgaggaaaaagcagatgtgagaactcaaggttcagggctgctcttctaagaaacaagtctgccataatctccatctgtgttggaatctgttaactaatgaactggtctctgtgcaaatcctgagtgctaaagcttccaacaagactgatg

SEQ ID NO: 436 - DNA, 96 bp, Homo sapiens
  source 1..96: mol_type = other DNA
cgctctcttacactcgggcctcagaagtccgtgccagtgaccggaggcggcggcggcgagcggttccttgtgggctagaagaatcctgcaaaaatg

SEQ ID NO: 437 - DNA, 517 bp, Homo sapiens
  source 1..517: mol_type = other DNA
agtccttctcattccttgcccccgcccaaggctctcttcaccttccccgcgggggtcctctcgttttctgtctcccaaatgctggcttcccgcctttcctcccccgcttatttacttaattaaggccctggggctgcaccccaccggcagctccttcgggggtgtggccgaagagctccgagggcggggctgaccgagccatattcgggcgtggccggtggtgattggtgagggcggggcctgccgcagggggcggggcctgcaggtttggcccccgcagggagcgcagctggcgccgctgggagctggtggcgcggcgcaggtcccggccgagtgtggcgcagcagtggcggcgcttcccattcgccatgcgccgggggtgggtgcccgaaggttgcatgatggaatttgaacattacttcaagaggttttgtattttggattagttaattgggtttgtcctctgctgactgtttcttcggatgcattttttggtgtgctcttgagggattaaatg

SEQ ID NO: 438 - DNA, 203 bp, Homo sapiens
  source 1..203: mol_type = other DNA
cgtccttccggctctcggctttgccacaaagcttcccgaagacgcggccgctacccggagacgcggtcgccacccagaagcgctctcccgggaagccccgctcgtgggaccgcgccacctgcgccgcctctgcggcccgcagcccgacgggcgccgccatgttggggtcctagcgagggacgcgtaggtgtcttcataagatg

SEQ ID NO: 439 - DNA, 444 bp, Homo sapiens
  source 1..444: mol_type = other DNA
cagtccttttgcaagagctgctaagagcgctgggtaaggagaggaaggggagagacatggaacttggctggtctgcagggaaatgccactgttttggccgggagtagggggcgggagtggcgggagagggggtggccggctggggaggagccagcctggtggagaagctgccctgtgggcgggggtgaggaggggagggctgtggtcaccaggcaggaaggaggggtggcctgacccctcggcagtccctcccctcagcctttccccaaattgctacttctctggggctccaggtcctgcttgtgctcagctccagctcactggctggccaccgagacttctggacaggaaactgcaccatcctcttctcccagcaagggggctccagagactgcccacccaggaagtctggtggcctggggatttggtgggtctgctccttag

SEQ ID NO: 440 - DNA, 656 bp, Homo sapiens
  source 1..656: mol_type = other DNA
cctcctttctccttccctcttgcctccagtgactgtctccaggatttctctcttcctatttcaggaggactctcacaggctcccacagcctgtgttaagctgaggtttcccctagatctcgtatatccccaacacatacctccacgcacacacatccccaagaacctcgagctcacaccaacagacacacgcgcgcatacacactcgctctcgcttgtccatctccctcccgggggagccggcgcgcgctcccacctttgccgcacactccggcgagccgagcccgcagcgctccaggattctgcggctcggaactcggattgcagctctgaacccccatggtggttttttaaacacttcttttccttctcttcctcgttttgattgcaccgtttccatctgggggctagaggagcaaggcagcagccttcccagccagcccttgttggcttgccatcgtccatctggcttataaaagtttgctgagcgcagtccagagggctgcgctgctcgtcccctcggctggcagaagggggtgacgctgggcagcggcgaggagcgcgccgctgcctctggcgggctttcggcttgaggggcaaggtgaagagcgcaccggccgtggggtttaccgagctggatttgtatgttgcaccatg

SEQ ID NO: 441 - DNA, 80 bp, Homo sapiens
  source 1..80: mol_type = other DNA
cggccttctgggcgcgcgcgacgtcagtttgagttctgtgttctccccgcccgtgtcccgcccgacccgcgcccgcgatg

SEQ ID NO: 442 - DNA, 36 bp, Homo sapiens
  source 1..36: mol_type = other DNA
agttccttccccagaaggagagattcctctgccatg

SEQ ID NO: 443 - DNA, 309 bp, Homo sapiens
  source 1..309: mol_type = other DNA
ggctctttctgcgagcgggcgcgcgggcgagcggttgtgcttgtgcttgtggcgcgtggtgcgggtttcggcggcggctgaggaagaagcgcgggcggcgccttcgggaggcgagcaggcagcagttggccgtgccgtagcagcgtcccgcgcgcggcgggcagcggcccaggaggcgcgtggcggcgctcggcctcgcggcggcggcggcggcagcggcccagcagttggcggcgagcgcgtctgcgcctgcgcggcgggccccgcgcccctcctccccccctgggcgcccccggcggcgtgtgaatg

SEQ ID NO: 444 - DNA, 121 bp, Homo sapiens
  source 1..121: mol_type = other DNA
cggccttccatcccagtttcttctaggaattcggagcctcccctgcagcgactcggaagattcgaggcggcgggggacaagtcggcgccccagagcggacgagtcaccaggtgtcaagatg

SEQ ID NO: 445 - DNA, 54 bp, Homo sapiens
  source 1..54: mol_type = other DNA
ccgcctttctccgctggcaacggcgccgctccccgctcctcctccccagccatg

SEQ ID NO: 446 - DNA, 49 bp, Homo sapiens
  source 1..49: mol_type = other DNA
ctcccttcccttgcatgctgcattgtgtcgggagttgctgacagccatg

SEQ ID NO: 447 - DNA, 210 bp, Homo sapiens
  source 1..210: mol_type = other DNA
ccgccttcctagtggagacgcgagtgggggaggagcagtccgaggggaacgtgggttgaacgttgcaactagggtggagatcaagctggaacaggagttccgatcgacccggtaccaagaaggggagtgcccgcggcagggttcattgaaaaaatccttagtgatattgacatgtctcaagtgacataaattagccaatgactcggaatg

SEQ ID NO: 448 - DNA, 63 bp, Homo sapiens
  source 1..63: mol_type = other DNA
tggcctttgtcaagtcatcccctcttctcctcaggaactgctcaaacctgtgccccaaagatg

SEQ ID NO: 449 - DNA, 17 bp, Homo sapiens
  source 1..17: mol_type = other DNA
ggatctctttcgccatg

SEQ ID NO: 450 - DNA, 104 bp, Homo sapiens
  source 1..104: mol_type = other DNA
ctgtctccctcggcctgtgccgccgccgacgccgcttgtgggcccgactccgctctgtctgcttcgccaccttctccccgagcactgcccggccggccgccatg

SEQ ID NO: 451 - DNA, 134 bp, Homo sapiens
  source 1..134: mol_type = other DNA
catcctctcttccaccctctcttctccctggtcaaccgctctgcaaacaaccatcaatctgatcccacaggcctgagaaagtctgctctccagtacctgctgctgatctgtttcagccgacaagaggcaccatg

SEQ ID NO: 452 - DNA, 47 bp, Homo sapiens
  source 1..47: mol_type = other DNA
ctgcctttcgatctctccacatctcggtggcgcgggatctcaagatg

SEQ ID NO: 453 - DNA, 76 bp, Homo sapiens
  source 1..76: mol_type = other DNA
aatcctttctcctgccgcagtggagaggagcggccggagcgagacacttcgccgaggcacagcagccggcaggatg

SEQ ID NO: 454 - DNA, 118 bp, Homo sapiens
  source 1..118: mol_type = other DNA
gagccttttctcgctaacaccgctcgccctctccgagtcagttccgcggtagaggtgacctgactctctgaggctcattttgcagttgttgaaattgtccccgcagttttcaatcatg

SEQ ID NO: 455 - DNA, 132 bp, Homo sapiens
  source 1..132: mol_type = other DNA
gtttctctatcagtcgcgcagctgtgttcgcggactcaggtggaaggaatttcttctcttcgttgacgttgctggtgttcactgtttggaattagtcaagtttcgggaatcaccgtcgctgccatcaacatg

SEQ ID NO: 456 - DNA, 72 bp, Homo sapiens
  source 1..72: mol_type = other DNA
ggttctctctctccagaaggttctgccggttcccccagctctgggtacccggctctgcatcgcgtcgccatg

SEQ ID NO: 457 - DNA, 56 bp, Homo sapiens
  source 1..56: mol_type = other DNA
caacctctcctcttcgtctccgccatcagctcggcagtcgcgaagcagcaaccatg

SEQ ID NO: 458 - DNA, 34 bp, Homo sapiens
  source 1..34: mol_type = other DNA
ctttctcccgaacgccagcgctgaggacacgatg

SEQ ID NO: 459 - DNA, 32 bp, Homo sapiens
  source 1..32: mol_type = other DNA
ctctctctgcaccttccttctgtcaatagatg

SEQ ID NO: 460 - DNA, 141 bp, Homo sapiens
  source 1..141: mol_type = other DNA
cggcctccatgtgcgacgtgttctccttctgcgtgggcgtggcgggccgcgcgcgggtctccgtggaagtccgtttcgtgagcagcgccaaggtgaggtcggggcgggtcctgccgggagcctctccccagtccggccatg

SEQ ID NO: 461 - DNA, 84 bp, Homo sapiens
  source 1..84: mol_type = other DNA
ctgcctttttacagctagacctgtgtgctgcaaggagctaaggccttcagtgtccccttccttacccaggtttctcacagaatg

SEQ ID NO: 462 - DNA, 493 bp, Homo sapiens
  source 1..493: mol_type = other DNA
ccgccccttgcaccgcccacgtggccagcgccacctgcctcattgtgcccaggagttctccaaacccgcgctgcggagtgagtgaccaagttccggccagttcgacctcgaggatccagaggtggagacggtactacctcccagctctgttttccatccccttcaggtccttcctcgggaggcggcgaaggcggtccaccctgcgcgtgatcctttatgcccggcccctgcccctccctccgggtggaacttccccctcaccgccagacttaagctgaggatcgttggatctctggcggggtgcagaactgagcccaggccacagtaccctattcacgctctgtgcttgtgccaaggtttcaagtgatcctcccgcctcagcctgcccaggtgctgagattacatgtatgagccactgcacctggaaaggagccagaaatgtgaagtgctagctgaaggatgagcagcagctagccaggcaaagggggcaatg

SEQ ID NO: 463 - DNA, 275 bp, Homo sapiens
  source 1..275: mol_type = other DNA
tgttcttcccccacctgccacgtacagagcccaagttctcgctaggcttgttgggtcagcgcgattggccggggcccgcgcgagcctgcgagcgaggtgcggcggtcgcgaagggcaaccgagggggccgtgaccaccgcctccccgcgacgccccagtccagtggcctcgcgtccgcccattcagcggagacctgcggagaggcggcggccgcggcctccgcaagccgtctttctctagagttgtatatatagaacatcctggagtccaccatg

SEQ ID NO: 464 - DNA, 133 bp, Homo sapiens
  source 1..133: mol_type = other DNA
catccttctcaaaagacttattgacagtgccaaagctcggtactggacacaacgagggacctgggtctacgataacgcgcttttgctcctcctgaagtgtctttggtccaacgttgttccagagtgtaccatg

SEQ ID NO: 465 - DNA, 117 bp, Homo sapiens
  source 1..117: mol_type = other DNA
ttttctctctctctttcactgcaaggcggcggcaggagaggttgtggtgctagtttctctaagccatccagtgccatcctcgtcgctgcagcgacacacgctctcgccgccgccatg

SEQ ID NO: 466 - DNA, 79 bp, Homo sapiens
  source 1..79: mol_type = other DNA
caccctctcggggagggagttggggaagctgggttggctgggttggtagctcctacctactgtgtggcaagaaggtatg

SEQ ID NO: 467 - DNA, 96 bp, Homo sapiens
  source 1..96: mol_type = other DNA
tctccttcctgcgcgcgcgcctgaagtcggcgtgggcgtttgaggaagctgggatacagcatttaatgaaaaatttatgcttaagaagtaaaaatg

SEQ ID NO: 468 - DNA, 165 bp, Homo sapiens
  source 1..165: mol_type = other DNA
cagtctttcctgctaagcctcagcgtctcctccaagccacatcaaaatctttccttctgggcctttcccagaagtgaattcttgctggaaggtataaaagaccagctcctccaagcagagcaactccctggctgccgtgaaaagacaaggcactgggcagtgatg

SEQ ID NO: 469 - DNA, 49 bp, Homo sapiens
  source 1..49: mol_type = other DNA
ctgcctttacaacagagggagacgatggactgagctgatccgcaccatg

SEQ ID NO: 470 - DNA, 36 bp, Homo sapiens
  source 1..36: mol_type = other DNA
cgccctctgcggtgaaggagagaccacactgccatg

SEQ ID NO: 471 - DNA, 192 bp, Homo sapiens
  source 1..192: mol_type = other DNA
aagcctctttcatcggggcacagacttccttttacttcttccttttgccctctcgcctcctcctcctgggaagaagcggaggcgccggcggtcggccgggatagcaacaggccgggccactgaggcggtgcggaaagtttctgtctgggagtgcggaactggggccgggttggtgtactgctcggagcaatg

SEQ ID NO: 472 - DNA, 531 bp, Homo sapiens
  source 1..531: mol_type = other DNA
cgccctttattcttgctcggcctcgccacagagagcaaatcagattggctgggcgacaacctcaaagggcggggctgcacacgttcactacgggaatgaggtagcggtggagggggcagttgggcggggataggccgtcctagctaaggtggtaaaggccaataactcttcaggctgcctctcctcgaaaagtcatcttctcgcgaacctttaaaatgccttcctccccaagcacctcaagggactagaactgagtgcttcatttgtcttttttcctccttgcaaaagtcccgtttgccaccatggggatgtaccaagtgagaccgagtagggggaacgagtggtgattgacgcgccaggttactggccactgctcacctaggcgctagcaaacttctgccaagatcggaactgagtactaaacagcctccacagttctccctggtgccgtctccggcttggcgccgcatcctcctctgggctcgcgatggccgcgtcccctcccgctgcggacgggtcctttggtacatg

SEQ ID NO: 473 - DNA, 167 bp, Homo sapiens
  source 1..167: mol_type = other DNA
ctgcctctttccggctgtgaccctcctcgccgccgccgcttggctgcgtcctccgactccccgcgccgccgagaccaggctcccgctccggttgcggccgcaccgccctccgcggccgccccctggggatccagcgagcgcggtcgtccttggtggaaggaaccatg

SEQ ID NO: 474 - DNA, 122 bp, Homo sapiens
  source 1..122: mol_type = other DNA
aactcctttccccctgctgtgacgtacaggtgaggtaaacagtactgaagtccagggcgtcggtgctcactgctctggcaatgcccggtgagactgaattatgtttaaatttattgtagatg

SEQ ID NO: 475 - DNA, 62 bp, Homo sapiens
  source 1..62: mol_type = other DNA
ggctccttcccagcccccggcctagctctgcgaacggtgactgcccatccttggccgcaatg

SEQ ID NO: 476 - DNA, 91 bp, Homo sapiens
  source 1..91: mol_type = other DNA
gacccttttcccctccccgggccacccagcccgcccaactcccagcggagagcaaggttttcttctgttttcatagccagccagaacaatg

SEQ ID NO: 477 - DNA, 33 bp, Homo sapiens
  source 1..33: mol_type = other DNA
ttttcttttcctctaggcagagaagaggcgatg

SEQ ID NO: 478 - DNA, 259 bp, Homo sapiens
  source 1..259: mol_type = other DNA
ctccctctttgctctaacagacagcagcgactttaggctggataatagtcaaattcttacctcgctctttcactgctagtaagatcagattgcgtttctttcagttactcttcaatcgccagtttcttgatctgcttctaaaagaagaagtagagaagataaatcctgtcttcaatacctggaaggaaaaacaaaataacctcaactccgttttgaaaaaaacattccaagaactttcatcagagattttacttagatg

SEQ ID NO: 479 - DNA, 22 bp, Homo sapiens
  source 1..22: mol_type = other DNA
gcttctctttctggtcaaaatg

SEQ ID NO: 480 - DNA, 74 bp, Homo sapiens
  source 1..74: mol_type = other DNA
ccgccttttgtgctgcggccgcggagcccccgagggcccagtgttcaccatcataccaggggccagaggcgatg

SEQ ID NO: 481 - DNA, 75 bp, Homo sapiens
  source 1..75: mol_type = other DNA
tggtctcttcggtctcctgccgcccccgggaagcgcgctgcgctgccgaggcgagctaagcgcccgctcgccatg

SEQ ID NO: 482 - DNA, 192 bp, Homo sapiens
  source 1..192: mol_type = other DNA
ccccctctccctccctccttgcgggccctcctccccttccctcccctccgcccccttccccgtaggcagcccgcccgccagtccgcccgcaccgcctccttcccagcccctagcgctccggctgggtctctcccccgccccccaggctcccccggtcgctctcctccggcggtcgcccgcgctcggtggatg

SEQ ID NO: 483 - DNA, 470 bp, Homo sapiens
  source 1..470: mol_type = other DNA
tcgccttctgcccgggcgctcgcagccgagcgcggccggggaagggctctcctcccagcgccgagcactgggccctggcagacgccccaagattgttgtgaggagtctagccagttggtgagcgctgtaatctgaaccagctgtgtccagactgaggccccatttgcattgtttaacatacttagaaaatgaagtgttcatttttaacattcctcctccaattggtttaatgctgaattactgaagagggctaagcaaaaccaggtgcttgcgctgagggctctgcagtggctgggaggaccccggcgctctccccgtgtcctctccacgactcgctcggcccctctggaataaaacacccgcgagccccgagggcccagaggaggccgacgtgcccgagctcctccgggggtcccgcccgcgagctttcttctcgccttcgcatctcctcctcgcgcgtcttggacatg

SEQ ID NO: 484 - DNA, 42 bp, Homo sapiens
  source 1..42: mol_type = other DNA
cgctcttccttccgcttgcgctgtgagctgaggcggtgtatg

SEQ ID NO: 485 - DNA, 193 bp, Homo sapiens
  source 1..193: mol_type = other DNA
tcgtcttctctgtcttagggctggtgctggccctgcccacgcctagggctccggcgcgtcacgggcctcagctgggattcccgcgcccctcggacggccacgagactcggacatctttccaggaacagcgtgaggaggacagaagcacccaacaggactgctcaagccacctgcgaacactgctgctaccatg

SEQ ID NO: 486 - DNA, 66 bp, Homo sapiens
  source 1..66: mol_type = other DNA
agttcccttttccggtcggcgtggtcttgcgagtggagtgtccgctgtgcccgggcctgcaccatg

SEQ ID NO: 487 - DNA, 36 bp, Homo sapiens
  source 1..36: mol_type = other DNA
cctcctcttgacgtggcagaggcggcgccagccatg

SEQ ID NO: 488 - DNA, 77 bp, Homo sapiens
  source 1..77: mol_type = other DNA
cgtcctctttcctttccttctccctccccttttcccttccttcgtcccttccttccttcctttcgccgggcgcgatg

SEQ ID NO: 489 - DNA, 110 bp, Homo sapiens
  source 1..110: mol_type = other DNA
ccgcccctcccgctggatcccgcagccgcggctcttcccgacgcgttccgccttccccagctgtgcactctccatccagctgtgcgctctcgtcgggagtcccagccatg

SEQ ID NO: 490 - DNA, 125 bp, Homo sapiens
  source 1..125: mol_type = other DNA
gcttctctttcctttcgcgccggttgccgctgcggagcgcggcgggtccatgtgcgcagtgagtggcgctattcctggcccagtagcacccgagccccgggtttgaccgagtccgcgctgcgatg

SEQ ID NO: 491 - DNA, 625 bp, Homo sapiens
  source 1..625: mol_type = other DNA
gctcctttgcgcacgcgcgccgcttcccagtggcaagcgcgggcaggaccgcgttgcgtcatcggggcgcgcgcctcagagagagctgtggttgccggaagttgagcggcggtaagtgagccgcggcgggcgagggtgtagtggggtcttgctgggccggttttggaggcctggagtcaaggggcgagctcgccagggagggcgagggtcacagcaagtctcaggatcctcctctgccagtttctgggtggtccttcctcctccagggactcactgattccggctggcgcccttcgtctgtagccgcgtcccctcagactggttcagtccggggtcttctgacttggaagctcgtgctgatttcctaagtcagcccctcctgtcctcttggtaggcagtgctcagaatcttcagtgttggaacacgggagatgggacatttggattcccagcctggctgtgtctggatttgctgtctctggcacgttccttccccatctaagctgcttttccatctgcaaaatgggaatgataatccgccatttgtttaagtgaggaggttaaataagtttactttctgagaaagaagattctcgattccttggttacagggttagaaactaatg

SEQ ID NO: 492 - DNA, 115 bp, Homo sapiens
  source 1..115: mol_type = other DNA
cgctccctttgccgccgccttagcccgggacccgaacccagcctctcccctacccgaacaccggccccggctccaccgaggcccgggtcccccagcccgtctcgccgccgccatg

SEQ ID NO: 493 - DNA, 224 bp, Homo sapiens
  source 1..224: mol_type = other DNA
agcccccttttccctccatggtttctctccgctcccgtgagtaacttggctccgggggctccgctcgcctgcccgcacgccgcccgccacccaggaccgcgccgccggcctccgccgctagcaaacccttccgacggccctcgctgcgcaagccgggacgcctctcccccctccgcccccgccgcggaaagttaagtttgaagaggggggaagaggggaacatg

SEQ ID NO: 494 - DNA, 86 bp, Homo sapiens
  source 1..86: mol_type = other DNA
acttctcttttccctagactgcagccagcggagcccgcagccggcccgagccaggaacccaggtccggagcctcaacttcaggatg

SEQ ID NO: 495 - DNA, 145 bp, Homo sapiens
  source 1..145: mol_type = other DNA
cgctccctctgggcttccgtcctccgcccgcgcccgacggagcctgttcgcgtcgactgcccagagtccgcgaatcctccgctccgagcccgtccggactcccccgatcccagctttctctcctttgaaaacactaagaataatg

SEQ ID NO: 496 - DNA, 159 bp, Homo sapiens
  source 1..159: mol_type = other DNA
aggcccccttctccgcctccgcctcctcccgacgccggcgccgctttctggaaggttcgtgaaggcagtgagggcttaccgttattacactgcggccggccagaatccgggtccatccgtccttcccgagccaacccagacacagcggagtttgccatg

SEQ ID NO: 497 - DNA, 38 bp, Homo sapiens
  source 1..38: mol_type = other DNA
gcttctttcccgagcttggaacttcgttatccgcgatg

SEQ ID NO: 498 - DNA, 69 bp, Homo sapiens
  source 1..69: mol_type = other DNA
acccctcttttctagagttctgcctcgcttcccggcgcggtcgcagccctcagcccacttaggataatg

SEQ ID NO: 499 - DNA, 55 bp, Homo sapiens
  source 1..55: mol_type = other DNA
ctcccttctgcctgggacgtcagcggacggggcgctcgcgggccggggctgtatg

SEQ ID NO: 500 - DNA, 1300 bp, Homo sapiens
  source 1..1300: mol_type = other DNA
aagccctttccgaggatggcaaaggatctgggaatgcttctccaaagatatgtggatggacgaaataggtctctggtgatactgaggcggggtggggacggggaggcaaagacttggcttcttaggaattggaagaaataagtaaacaatgtttggtagcaatttgtaataaggaagtaatcataaaattaactacgtccgtttctgattgtgtcaactttgtcaaggagtagaagtttaagaattgaatactgtcctgcaaacaacgtaacctcatctcctgtttgacacaccctgttgagaagcagtcctttacctcctaaatttctttttcgaaattatcatttcctttatggactgagaataacactgcctgttcactcccaccgagctgtgaacagtgaccttaattcttccaagcagggaagtgtagaaactaaggtctgtgacagaccgcaaaatcatctcccaatctttaaggaaaatcagaatcacgcataatcccatagagataaatttgatgcatagtcttttcctatgcatacatttttcctttttttttacaataattgaatttttatattttttcagcttgcttctgtcacttaatatattatgagtaattttttttggttttttttgttttggagacagaatctcgcactgtcgcccgggttggagtgcagtggcgcgatctcggctcactgcaacctctgcctcccggcttcaagcgattctcctgtctcagcctccctagtagctgggattacaggcacccgccaccacgcccagctaatttttttgtgtgtttttagtagagaaggggtttcactatattggccaggctggtctcaaactcctgacctcatgatacgcccacctcggtctcccaaagtgctaggattacaggcctgagccaccgcgccagcctattatgaataattttctacatgaatacgcatcgtactaaataactttaaatgttggtgtagtatgccattgtatgggtatggcatcatttattgttagacgttagattgtttccactaagtcggtattataaagagaactaatgacttcattattattagctttttctttctttggacacaatatccaaaaagaaattgttgtttcaaagatatgcaagatttttaaggctttttgatatgtattgtcaaattgccctccagaaagaatacatgaatttacactcagcagctctgcttccagcgtgaaagactttctattgtaccattttggtgttttttccctagctctcagactccccagtacaatg

SEQ ID NO: 501 - DNA, 539 bp, Homo sapiens
  source 1..539: mol_type = other DNA
gtgtctcccggtcgcgcgtggaggtcggtcgctcagagctgctgggcgcagtttctccgcctgctgcttcggcgcggctgtatcggcgagcgagcgagttcccgcgagttctcggtggcgctcccccttcctttcagtctccacggactggcccctcgtccttctacttgaccgctcccgtcttccgccgccttctggcgctttccgttgggccgattcccgcccgcttcctcctgcttcccatcgaagctctagaaatgaatgtttccatctcttcagagatgaaccagattatgatgcatcattatcacagaagaaattcgtgtctatagcttttaaggacttgattacatcattttcaagcctgatagttttggaatcaccattagagcttaagacacacctgccttcatttcaaccacctgtcttcataccctgacgaagtgcaccttttaacactcctttgtccttggattacttaagagttcccagaaatacatttgccaccaacagagtagccaaatttataaggaaaaatg

SEQ ID NO: 502 - DNA, 310 bp, Homo sapiens
  source 1..310: mol_type = other DNA
acccctctttttctccaaaggagtgcttgtggagatcggatcttttctccagcaattgggggaaagaaggctttttctctgaattcgcttagtgtaaccagcggcgtatattttttaggcgccttttcgaaaacctagtagttaatattcatttgtttaaatcttattttatttttaagctcaaactgcttaagaataccttaattccttaaagtgaaataattttttgcaaaggggtttcctcgatttggagctttttttttcttccaccgtcatttctaactcttaaaaccaactcagttccatcatg

SEQ ID NO: 503 - DNA, 104 bp, Homo sapiens
  source 1..104: mol_type = other DNA
ttttcctttcttagccaaatcaccaaaatgtccagttagaacaagaatttagcattctgcaaaagaagttaacagctgagataacgaggaaatattctgaaatg

SEQ ID NO: 504 - DNA, 134 bp, Homo sapiens
  source 1..134: mol_type = other DNA
ggttcttctgggcgctaagggagctgacggagagggccaccgcccagcaatagacggtgcctcagcctgccgagccgcagtttccgtggtgtgagtgagtccgggcccgtgtcccctctcccgccgccgccatg

SEQ ID NO: 505 - DNA, 296 bp, Homo sapiens
  source 1..296: mol_type = other DNA
cggcccttcgcagcgggcgcgctgtcagacctcagtctggcggctgcattgctgggcgcgccgctctcgtctgatccctgctggggacggttgcccgggcaggatcctttacgatcccttctcggtttctccgtcgtcacagggaataaatctcgctcgaaactcactggaccgctcctagaaaggcgaaaagatattcaggagcccttccattttccttccagtaggcaccgaacccagcattttcggcaaccgctgctggcagttttgccaggtgtttgttaccttgaaaaatg

SEQ ID NO: 506 - DNA, 231 bp, Homo sapiens
  source 1..231: mol_type = other DNA
cgctctctggcaagaggcaagaggtagcaacagcgagcgtgccggtcgctagtcgcgggtccccgagtgagcacgccagggagcaggagaccaaacgacgggggtcggagtcagagtcgcagtgggagtccccggaccggagcacgagcctgagcgggagagcgccgctcgcacgcccgtcgccacccgcgtacccggcgcagccagagccaccagcgcagcgctgccatg

SEQ ID NO: 507 - DNA, 152 bp, Homo sapiens
  source 1..152: mol_type = other DNA
gggtctttgtctcgctgcagcgggtgctgcaggtctggccttcacttttctgcgtcctcttactcctagaggcccagcctctgtggcgctgtgatctggttattgggagattcacagctaagacgccaggatcccccggaagcctagaaatg

SEQ ID NO: 508 - DNA, 150 bp, Homo sapiens
  source 1..150: mol_type = other DNA
ctttctttgacgcaagggctcgagacgcagccgccgtcggccgagcgcccggctagaagcgacaccagacggagcctccggagttcctccgcccccacctcgccgggtcctggagccgcagtcctcccagctgccctcctcgtggccatg

SEQ ID NO: 509 - DNA, 608 bp, Homo sapiens
  source 1..608: mol_type = other DNA
ctgtcttttctccagtttgagcgggggtgtcgggagcaggcggagagctttcctgcgaggctgtggaagcagtgaacactcttctcagcggctcgcctcccagcagtgctattttttgccatccgccctcacccccagcacacgcgctcgcacacacacgcacgcacgcacacacacacacacacacactcacacagagacctctctgggtttctttgccttgagtctcccggggctgtgagaagccaggcgcatctcaaaccgagctggcagctccaggctccggagccatgccctgcacggaccctcgtctttaccacgctcctgaggaatgaaaggaacccagggaccctcagaaggcagcagtgatgcggaccaaccccccggagcctgcacccttccgagggccataggcgacccagggaactggagagagctccagaaaggaaatcccagctttcccaaagtccctgtggatgctgacaaaaggagacctgaatttttggaagagcctgtactaggttacccggctgcagagtgattttcccctccggcactgactctccccctccaacccccagccgtccagagtaccatgaagaattatg

SEQ ID NO: 510 - DNA, 32 bp, Homo sapiens
  source 1..32: mol_type = other DNA
ttccctctccgctgcgtccccgcgcgaagatg

SEQ ID NO: 511 - DNA, 56 bp, Homo sapiens
  source 1..56: mol_type = other DNA
cttcctccgcggtcttccgagcggtcgcgtgaactgcttcctgcaggctggccatg

SEQ ID NO: 512 - DNA, 197 bp, Homo sapiens
  source 1..197: mol_type = other DNA
cgctctttccgcgcggtgcattctggggcccgaggtcgagcccgccgctgccgccgtcgcctgagggaagcgagaagaggccgcgaccggagagaaaaagcggagtcgccaccggagagaagtcgactccctagcagcagccgccgccagagaggcccgcccaccagttcgcccgtccccctgccccgttcacaatg

SEQ ID NO: 513 - DNA, 1250 bp, Homo sapiens
  source 1..1250: mol_type = other DNA
ttttcttcctggtggcgtttgggcttaatacagctttggcgaggtcggatgacgggtgggagccagcggtggaaggggtggcgaaagtaccggtttgccccaggccgccgaggggcctccttagagagaccttgcctgctccgctcgcgtccgccggggccgcgcgggtcctcctggcgccgccaggttcaaaaagccactcgagttgtcactgcgacggccctgggccaggagccgtttcgggatctgtcaaacaacgagttttcgtcgttcgaatcaggttgactggtccttcatccccccaatctcccgtacctggcgagtccagctcgtcgcggcaatgctaagaaaagagtgatatgcaagctgagaccaaaaatatggtatgatttagccatactgaaggggaaggaaataagagctgggcaaagcattctgtgaattggctgactccacttctatggtgagagagaggagtgcatcaaagattactcccagtagagatggtttcagcatgttggccagtctggtctcagactcctgacctcaagtgatccacccacctcggcctcccaaaatgctgggattacaggtataagccactgtgcctggccaaagataccgttaaccctggataaagagaatggaggttacctctgtccgtgtagattcctaagctgtcctggagtgatccttggagtaaaggaaaggtgctttgaagcacattcagccatcagccctgtgggatggcagccactgatttgtcctatggtctttacagggacccagtctgccttcaagaaaagacagaagtagaaagggtggtggctgactgtctgacaaattgttatcaggtatgcaggaagtatatccttctccaaaatatcatacttgcatcaccaggtagacacatttccttctacacagaattatcttcagagcttcttaaagcaaataaagcctgcttcaaggactgagtccctagtcgaattcccggaaggagtggagcctgtcatattgtgtttatctagcatctgctcaagagtgtgctgcagtggagggaaatcagatgacctcccagtctggttgtgttacatacaatcatgtgtaagaagtgccattcaagccgtgtcactggaggggactgacagtgagattcagtgacttttgatgatctggctgtggacttcaccccagaagaatggactttactggacccaactcagagaaacctctacagagatgtgatg

SEQ ID NO: 514 - DNA, 36 bp, Homo sapiens
  source 1..36: mol_type = other DNA
gcttccctcccggcgcagtcaccggcgcggtctatg

SEQ ID NO: 515 - DNA, 182 bp, Homo sapiens
  source 1..182: mol_type = other DNA
cttcctttctcgtgttgttatcgggtagctgcctgctcagaacccacaaagcctgcccctcatcccaggcagagagcaacccagctctttccccagacactgagagctggtggtgcctgctgtcccagggagagttgcatcgccctccacagagcaggcttgcatctgactgacccaccatg

SEQ ID NO: 516 - DNA, 336 bp, Homo sapiens
  source 1..336: mol_type = other DNA
cctccccttttgggtcggtagttcagcgccggcgccggtgtgcgagccgcggcagagtgaggcaggcaacccgaggtgcggagcgacctgcggaggctgagccccgctttctcccagggtttcttatcagccagccgccgctgtccccgggggagtaggaggctcctgacaggccgcggctgtctgtgtgtccttctgagtgtcagaggaacggccagaccccgcgggccggagcagaacgcggccagggcagaaagcggcggcaggagaagcaggcagggggccggaggacgcagaccgagacccgaggcggaggcggaccgcgagccggccatg

SEQ ID NO: 517 - DNA, 857 bp, Homo sapiens
  source 1..857: mol_type = other DNA
tggtcctttcttttatgattcacaaggaatgaccctcttcatcgcctctcctaattcagtcctcacaacagtccttttacaaatgggacaacaggttagaggaagtcaggcagatttccagcatcatagagagtaaaggaccagggaaggatcaggattcaaggactgcacccaggctctgcttccagcttgctgtgtgactttgggtaattttgttcccttagggaactgagctttctcatttgtaaatgcaaacaggctgttgggaggatcaaatgagatccaggggtgaaaacagcttagtttactttcaggaatttacccacgcggtatataaaggcaaaatattattatagtcaggtgattgtagattgaggaacccatttcctcattctgcaaattgcaaacctgagggcccaaagagggacaggggcttgccccaggtctcagcaggctgtgagcaagagctaaagcctaatcctcctgcctttgggcctggagcccttccttgtaccccaggggtcagtgtctttgttggatacaggcttagattgactgactgtaccctgagaacctaggggagtccctgttcccaattcttctcctacccccaccttggcctgatggaggaagaccctgctgtgttgagatgagcaccagagccaagaagctgaggaggatctggagaattctggaggaagaggagagtgttgctggagctgtacagaccctgcttctcaggtcccaggaaggtggcgtcagcatctgcagccgcgtcgacgttgtcggagcctccgcggaggacccaggagagccggactaggaccagggccctgggcctccccacactccccatg

SEQ ID NO: 518 - DNA, 54 bp, Homo sapiens
  source 1..54: mol_type = other DNA
ctttccttcggcttccgttcttggtccatgtgagagaagctggctgctgaaatg

SEQ ID NO: 519 - DNA, 67 bp, Homo sapiens
  source 1..67: mol_type = other DNA
ggttctctgtcagtcgcgagcgaacgaccaagagggtgttcgactgctagagccgagcgaagcgatg

SEQ ID NO: 520 - DNA, 96 bp, Homo sapiens
  source 1..96: mol_type = other DNA
ccgcctcttgtttttcccgcgaaactcggcggctgagcgtggaggttcttgtctcccctggtttgtgaagtgcggaaaaccagaggcgcagtcatg

SEQ ID NO: 521 - DNA, 114 bp, Homo sapiens
  source 1..114: mol_type = other DNA
tactctttatcaatcgtcttccggcgcagccccgtccctgttttttgtgctcctccgagctcgctgttcgtccgggttttttacgttttaatttccaggacttgaactgccatg

SEQ ID NO: 522 - DNA, 219 bp, Homo sapiens
  source 1..219: mol_type = other DNA
ctccccctctcgctctcctccctcttcccggctccagctccgccgccagctccagcctttgctccccctcccaaagtcccctccccggagcggagcgcacctagggtccctcttccgtccccccagcccagctacccgttcagaccagcagcctcggggggcacccccccgccagcctgcctccctcccgctcagccctgccagggttccccagccatg

SEQ ID NO: 523 - DNA, 146 bp, Homo sapiens
  source 1..146: mol_type = other DNA
agatcttcttccgctctgaggcgctactgaggccgcggagccggactgcggttggggcgggaagagccggggccgtggctgacatggagcagccctgctgctgaggccgcgccctccccgccctgaggtgggggcccaccaggatg

SEQ ID NO: 524 - DNA, 304 bp, Homo sapiens
  source 1..304: mol_type = other DNA
cggcctctttgtgtggtgcccagataggggagcggaggtggcggcggcggcggtagcggtggccttggttgtcttccagtctcctcggctcgccctttagccggcaccgctccccttccctcccccttcctctcttccttccttccctccccttccctttttcccttccccgtcggtgagcggcgggggtggctccagcaacggctgggcccaagctgtgtagaggccttaaccaacgataacggcggcgacggcgaaacctcggagctcgcagggcgggggcaaggcccgggccttggagatg

SEQ ID NO: 525 - DNA, 737 bp, Homo sapiens
  source 1..737: mol_type = other DNA
ggctcttttgttcggctgaggggagggccgttggccggggcctgcggtacgccgcttcagtgagggacgccactgcggccacccggcttgctgccttcctgggcgccactcccccaggcgacccgacgcgacgcgccagcagcgcagcaccgattcctctcgggctcttgggcgctgctctgaggtgaggagcccgctggaggcgggagagctgggggagggggcgcggcggcggcggcggcgggagccctgcgtgagggaacgcgctttcgaggcggaggttaggagcggggagcgcgcccgggtccagcgtcctgcttctccgcttcccgcgctgagctcttcgcctgtcgctgaggcgtcggtgccagctgcgtgaaggatggagagggcggggcgcgaatcctgagccagagactgagtgcttgggggtgggccgagcacttgggggccgctcttcggggcccgggtggtctggaacaatgttgcttggctgggcggctgcgggatagggcggaaggggacaggcttgaggcttggataggcgtgaggaggcgcatacgaccgcacaacccgaggtttgtaactgtattcggaagacgccgggtccggctgggactgccagaggaacctggctttgcaggactacggaggagtaacgtcgagtgaattggaagagggcccagggccgcacaagcagcgtcaccctttacaccagaaagctggcgggcactatg

SEQ ID NO: 526 - DNA, 204 bp, Homo sapiens
  source 1..204: mol_type = other DNA
cgcccttcttaggaggggctgcattgcagggggagagtgaactgacagactcagtcactgaagagggaaaaggagtgagaagacaaagccgtcaaagccccaacagctttgtatttctccagcccggcgcagaccccggagctcccgaggcactccctccatctttggaacacgccagtaattgattgataacaggaagctatg

SEQ ID NO: 527 - DNA, 145 bp, Homo sapiens
  source 1..145: mol_type = other DNA
ttttctttctttcctagagtctctgaagccacagatctcttaagaactttctgtctccaaaccgtggctgctcgataaatcagacagaacagttaatcctcaatttaagcctgatctaacccctagaaacagatatagaacaatg

SEQ ID NO: 528 - DNA, 592 bp, Homo sapiens
  source 1..592: mol_type = other DNA
acttcttcctcccttcccctctcttcccctccctccccagccttccccgcgagcggacgcggcagcgcctctgtctcgctttttcttatttttcccccctttcccctttctttttttttttttcttttcttttctcccctccccccctttcaccatttcccctcggaggcgctttccccgggcaggggcagagccggtctcaccccccgcctctccccggcccccgccgccctatggcgagagggagccccctcccaacccgggctcgagcggcggcggcctcaggccgggggtcatcatggaactaattcgctgaccgacccagcggccgcagccgtgcgtcccgctcgagcgccagcgcccgcgcccgcgccccccgatccgcttcccctttctccctcctcagttggccgagtcgtcccgcgcgcaccgcctccgcgcgcctatgagaatgaggtggtaacgggcccccggatgaccccgcgtcaccactgtgaggcctacagctctgccggggaggaggaggaggaggaagaggaggagaaggtagctacagcaagctgggtagcaggcagatccaaaggatatcatg

SEQ ID NO: 529 - DNA, 29 bp, Homo sapiens
  source 1..29: mol_type = other DNA
cattccctcgcgctctctcgggcaacatg

SEQ ID NO: 530 - DNA, 71 bp, Homo sapiens
  source 1..71: mol_type = other DNA
gtctctttgtcctgccggcactgaggactcatccatctgcacagctggggcccctgggaggagacgccatg

SEQ ID NO: 531 - DNA, 97 bp, Homo sapiens
  source 1..97: mol_type = other DNA
gggtctctcggtcccgcagccgtgaggaggacggtctgcatactcgctgcccgccggctccctcccccgcgtccctgcgaccgccgcggcgaagatg

SEQ ID NO: 532 - DNA, 130 bp, Homo sapiens
  source 1..130: mol_type = other DNA
gggcccttttcgcggccgggccccagcatggctgcccccacggctgagggcctggcagctgctgcgccctcgctttcttgacattccctggcttctgtgctctcttccccaggccaccccagcagacatg

SEQ ID NO: 533 - DNA, 26 bp, Homo sapiens
  source 1..26: mol_type = other DNA
ctgtctttctcagaaaaccaaatatg

SEQ ID NO: 534 - DNA, 400 bp, Homo sapiens
  source 1..400: mol_type = other DNA
gtttctctgcagttttcctcagctttgggtggtggccgctgccgggcatcggcttccagtccgcggagggcgaggcggcgtggacagcggccccggcacccagcgccccgccgcccgcaagccgcgcgcccgtccgccgcgccccgagcccgccgcttcctatctcagcgccctgccgccgccgccgcggcccagcgagcggccctgatgcaggccatcaagtgtgtggtggtgggagacggaaacaagaatctcagtgtaacccgagcaaaatcgcgcgtctcagcgttgcttgtatagagctgtaggtaaaacttgcctactgatcagttacacaaccaatgcatttcctggagaatatatccctactgtctttgacaattattctgccaatgttatg

SEQ ID NO: 535 - DNA, 17 bp, Homo sapiens
  source 1..17: mol_type = other DNA
tcgtctcctccaagatg

SEQ ID NO: 536 - DNA, 152 bp, Homo sapiens
  source 1..152: mol_type = other DNA
ccgcctttccttttgtttgtctcacgttttgcgtgggaggcggtcccgggatttcaggggtctaccggctctcttatggcgaatgcaacccgaagagagagtgagctgtatcttcagagttgtctccgtctttccaagaacagaacaaaatg

SEQ ID NO: 537 - DNA, 40 bp, Homo sapiens
  source 1..40: mol_type = other DNA
gcctcctttccaagcgcgacccgttgaggtccttgtcatg

SEQ ID NO: 538 - DNA, 152 bp, Homo sapiens
  source 1..152: mol_type = other DNA
ccgcctttccttttgtttttctcaggttttgcgtgggaggcggtcccgggatttcaagggtctacgcgcttttctatggcgaatgcaacccgacgagggagtgggctgtatcttcagagttgtctccgtctttccaagaacagaacaaaatg

SEQ ID NO: 539 - DNA, 235 bp, Homo sapiens
  source 1..235: mol_type = other DNA
ctttctttttcctttcttcggaatgagagactcaaccataatagaaagaatggagaactattaaccaccattcttcagtgggctgtgattttcagaggggaatactaagaaatggttttccatactggaacccaaaggtaaagacactcaaggacagacatttttggcagagctgctcactccttgctcagctcagttttctgtgcttggaccctctgggcccatcctggccatg

SEQ ID NO: 540 - DNA, 131 bp, Homo sapiens
  source 1..131: mol_type = other DNA
ctctttgggatgctttgttgtctggtggtgactgtgcccatgggtgagttgtatcggaaaatcgtcatgtgaggatcagaggggaaaagaaaacagaggcctctggtctctgcctgccctgggtgctcatg

SEQ ID NO: 541 - DNA, 137 bp, Homo sapiens
  source 1..137: mol_type = other DNA
acgcctcctcttgcgctgtcctgttaatggcgggcagtagccgctgaggggattgcagataaccgcttcccgcacggggaaagtctaccctgcctgccactttctgctcgccgtcagcgccggagctcgccagcatg

SEQ ID NO: 542 - DNA, 130 bp, Homo sapiens
  source 1..130: mol_type = other DNA
tgctctttctctagcacggtcccactctgcagactcagtgccttattcagtcttctctctcgctctctccgctgctgtagccggaccctttgccttcgccactgctcagcgtctgcacatccctacaatg

SEQ ID NO: 543 - DNA, 323 bp, Homo sapiens
  source 1..323: mol_type = other DNA
caccctcttccgccgctcccgcccagcgacctcgctcccggggcgacgccccgcgtgcgccagagtcgccgaggtcgtccccggcaccggaagtgaccctggcgggtttgtcttcaaattctcggcgagcaggagccgcgccggcaggtggtgttgacgattgaactgggcagtactggggccgtgagcggagagcaaagtgggctggactgggtcaggccctccttcctcgctgccgggatctccactccgccaatcccctgtgcctggcgttgggcggtttcccgaggagcttgggccgccgcagcttacagttgaacatg

SEQ ID NO: 544 - DNA, 186 bp, Homo sapiens
  source 1..186: mol_type = other DNA
ctttctctttttcctttcttccggatgagaggctaagccataatagaaagaatggagaattattgattgaccgtctttattctgtgggctctgattctccaatgggaataccaagggatggttttccatactggaacccaaaggtaaagacactcaaggacagacatttttggcagagcatagatg

SEQ ID NO: 545 - DNA, 100 bp, Homo sapiens
  source 1..100: mol_type = other DNA
cggcctttcatttccgcttccggtgcgggccgcgcgcgagcgcagcggtgggaggcggcgaccagccggttgaggccccaggcttggcctcaccacaatg

SEQ ID NO: 546 - DNA, 126 bp, Homo sapiens
  source 1..126: mol_type = other DNA
ctccctcctggcgcttgtcctcctctcccagtcggcaccacagcggtggctgccgggcgtggtgtcggtgggtcggttggtttttgtctcaccgttggtgtccgtgccgttcagttgcccgccatg

SEQ ID NO: 547 - DNA, 80 bp, Homo sapiens
  source 1..80: mol_type = other DNA
gcgtctctatcgcgccagttcctcagcctcagtgctatgaaggtgacagcgtgaggtgacccatctggcccgccgcgatg

SEQ ID NO: 548 - DNA, 63 bp, Homo sapiens
  source 1..63: mol_type = other DNA
gggcctttgcccgccttggcggccggctctacgttccctgttctcgcctgcagctccgccatg

SEQ ID NO: 549 - DNA, 309 bp, Homo sapiens
  source 1..309: mol_type = other DNA
gcttcccttccgatgattcggctcttctcggctcagtctcagcgaagcgtctgcgaccgtcgtttgagtcgtcgctgccgctgccgctgccactgccactgccacctcgcggatcaggagccagcgttgttcgcccgacgcctcgctgccggtgggaggaagcgagagggaagccgcttgcgggtttgtcgccgctgctcgcccaccgcctggaagagccgagccccggcccagtcggtcgcttgccaccgctcgtagccgttacccgcgggccgccacagccgccggccgggagaggcgcgcgccatg

SEQ ID NO: 550 - DNA, 133 bp, Homo sapiens
  source 1..133: mol_type = other DNA
gggcctttgtcccgacagagctccacttcctgtccccgcggctctgtgtcccctgctagccgtaggtcgtgtgacccgcaggcaccgggagatccagaagtgaaacgccaggctctctggaggccaggagatg

SEQ ID NO: 551 - DNA, 405 bp, Homo sapiens
  source 1..405: mol_type = other DNA
cagtctttcgcggcccgggagctcagcagagctaccagctgccctgttggcttcgctggtcggatcgtcctcctggccccgccaaacaggcggggggagcggccccgactgtggggccatggcagtagtctcctcgttcgccgccgccgctagcctagctgagtcgccggcttctgcgctaggggctcccaccgcctccgcaggctaaggagccgctgccaccaacgagctgtgagggttactatgctccctctttgccgccgtctcctcctcttgcccgcgcaggcacccctctggctgctcagtcctgcctcagtgtcaaaccagaagagaagtaaaattcaacaaaaatttatgtgtggagttccttcttaaaagaagaaaaaagtgattatttagactatg

SEQ ID NO: 552 - DNA, 196 bp, Homo sapiens
  source 1..196: mol_type = other DNA
agccctccttgctagtctgggacttcccggtggagtgaggaacccagcaacacgctcctgacttcccttcccaaggactcgacctgagaaggacacagcagtctctgaatttcatgctctcctctttgatgtgaagaaaatgaaaagctgaacagttgtggaactgtggatagagttagacaataaggccgccatg

SEQ ID NO: 553 - DNA, 238 bp, Homo sapiens
  source 1..238: mol_type = other DNA
ccctccctccctttccctccctcgtcgactgttgcttgctggtcgcagactccctgacccctccctcacccctccctaacctcggtgccaccggattgcccttcttttcctgttgcccagcccagccctagtgtcagggcgggggcctggagcagcccgaggcactgcagcagaagagagaaaagacaacgacgaccctcagctcgccagtccggtcgctggcttcgccgccgccatg

SEQ ID NO: 554 - DNA, 166 bp, Homo sapiens
  source 1..166: mol_type = other DNA
ctttctttccgtcgcagagagcatcggccggcgaccgttccggcggccattgcgaaaacttccccacggctactgcgtccacgtggcggtggcgtggggactccctgaaagcagagcggcagggcgcccggaagtcgtgagtcgagtcttcccgggctaatccatg

SEQ ID NO: 555 - DNA, 576 bp, Homo sapiens
  source 1..576: mol_type = other DNA
ctcccttccccctccgcccccggacggccgctggggcgcgcgcctctcctcgcacccccaccctgagtccccacactccgcggggccaccgagctgctgaggcccctttgcgggcccgccgagcggttccgggtttagggttcacaggtcagagttgactccctgaaaagtgcagccggtttgaaatgcaagatggcggcggcgtggcgctgagaggcgcggcggcccctgcaggagaagacagactgctgctttggacctgttggtaatgatggcctgagctaaacatctaactagaagggatacccttccatttcaaagaacagaatgctaaggaagctgtggcaagtgattggagttgtgcttcaaaaatttcagaaattcagcagtattttatctgccaacaataagctctttacttgattgcaccatgagaaagctgctaatgagacttgttgagcacaaaaatggacttgaagaaccaaaagccattgttttcaaatgaagaacactgaacagttttaagcctcgatgctttttaatcaccactgagcttttcctcataacatcagaatg

SEQ ID NO: 556 - DNA, 81 bp, Homo sapiens
  source 1..81: mol_type = other DNA
ccttccttccctccctccttccctcctgtcgccgtctcttctggcgccgctgctcccggaggagctcccggcacggcgatg

SEQ ID NO: 557 - DNA, 180 bp, Homo sapiens
  source 1..180: mol_type = other DNA
ctttctctcaggatttccgctggcttcaggttccggtcaggcgtcgggacagagcctgatccaggcttcggcggccggtggcagctctcgatcagctctcgcagtcggagaggcggctaaggaaaggtgccacagcagagacgcgaaggagaggccctagaaccttttcaaagaagaatg

SEQ ID NO: 558 - DNA, 58 bp, Homo sapiens
  source 1..58: mol_type = other DNA
gagcctctttggtagcaggaggctggaagaaaggacagaagtagctctggctgtgatg

SEQ ID NO: 559 - DNA, 132 bp, Homo sapiens
  source 1..132: mol_type = other DNA
tgccctttctttcgccagccttacgggcccgaaccctcgtgtgaagggtgcagtacctaagccggagcggggtagaggcgggccggcacccccttctgacctccagtgccgccggcctcaagatcagacatg

SEQ ID NO: 560 - DNA, 334 bp, Homo sapiens
  source 1..334: mol_type = other DNA
ctgccttttctcctgccgggtagtttcgctttcctgcgcagagtctgcggaggggctcggctgcaccggggggatcgcgcctggcagaccccagaccgagcagaggcgacccagcgcgctcgggagaggctgcaccgccgcgcccccgcctagcccttccggatcctgcgcgcagaaaagtttcatttgctgtatgccatcctcgagagctgtctaggttaacgttcgcactctgtgtatataacctcgacagtcttggcacctaacgtgctgtgcgtagctgctcctttggttgaatccccaggcccttgttggggcacaaggtggcaggatg

SEQ ID NO: 561 - DNA, 102 bp, Homo sapiens
  source 1..102: mol_type = other DNA
agctctctcgagtcactccggcgcagtgttgggactgtctgggtatcggaaagcaagcctacgttgctcactattacgtataatccttttcttttcaagatg

SEQ ID NO: 562 - DNA, 16 bp, Homo sapiens
  source 1..16: mol_type = other DNA
cgttctccgtaagatg

SEQ ID NO: 563 - DNA, 16 bp, Homo sapiens
  source 1..16: mol_type = other DNA
gcttctctgcactatg

SEQ ID NO: 564 - DNA, 140 bp, Homo sapiens
  source 1..140: mol_type = other DNA
cgctcttttctcgggacgggagaggccgtgtagcgtcgccgttactccgaggagataccagtcggtagaggagaagtcgaggttagagggaactgggaggcactttgctgtctgcaatcgaagttgagggtgcaaaaatg

SEQ ID NO: 565 - DNA, 85 bp, Homo sapiens
  source 1..85: mol_type = other DNA
atttctttgttaagtcgttccctctacaaaggacttcctagtgggtgtgaaaggcagcggtggccacagaggcggcggagagatg

SEQ ID NO: 566 - DNA, 46 bp, Homo sapiens
  source 1..46: mol_type = other DNA
cggtctccgccggttggggggaagtaattccggttgttgcaccatg

SEQ ID NO: 567 - DNA, 42 bp, Homo sapiens
  source 1..42: mol_type = other DNA
cttcctcctcgcccccacccagacccagaaggcgccaccatg

SEQ ID NO: 568 - DNA, 81 bp, Homo sapiens
  source 1..81: mol_type = other DNA
cttccttcctagtcgcggggagtctgagaaagcgcacctgttccgcgaccgtcacgcacccctcctccgcctgccgcgatg

SEQ ID NO: 569 - DNA, 50 bp, Homo sapiens
  source 1..50: mol_type = other DNA
ggttctctgtcccggttcctggggttgcacagacagaccctgtaaacatg

SEQ ID NO: 570 - DNA, 292 bp, Homo sapiens
  source 1..292: mol_type = other DNA
gggtccctcgctggctagtaggagagactggtgcttgccccgcccggtggactaactcgcttaattttaaataaaaagtcgaggacacggcggtcgttttcccgaagacatgggccctcccatgggccatttgctccctggaggccctcgcgtcttgctgagcccggggagttaggatgacgcgagcggtgagggagcccggaacgattccttcgcggaacaattgaggcgaggcctttgggagtactttgtgggacggaccctggcgggccctgccagacgcacagggatg

SEQ ID NO: 571 - DNA, 82 bp, Homo sapiens
  source 1..82: mol_type = other DNA
ccgccttcccaagagcccctgcggccgggcgcgaaaatggcggcggcggcgacggccgggcgctcctgaagcagcagttatg

SEQ ID NO: 572 - DNA, 87 bp, Homo sapiens
  source 1..87: mol_type = other DNA
cggccttcctgcagcctcttccgctcgccggctgcggcgcctgggacggttgcggtgggtctgggcgctgggaagtcgtccaagatg

SEQ ID NO: 573 - DNA, 128 bp, Homo sapiens
  source 1..128: mol_type = other DNA
cggtctctggcggagtcggggaatcggatcaaggcgagaggatccggcagggaaggagcttcggggccgggggttgggccgcacatttacgtgcgcgaagcggagtggaccgggagctggtgacgatg

SEQ ID NO: 574 - DNA, 51 bp, Homo sapiens
  source 1..51: mol_type = other DNA
tctcctctttctccaccacctcgggccccggtgtccccggccagcactatg

SEQ ID NO: 575 - DNA, 338 bp, Homo sapiens
  source 1..338: mol_type = other DNA
tcttccttccgggtcgcgctaggccgggcttgcggcggttgtgccgcatctagagagtcggggagccgcccccgcacccaggccttctcgcgctgcctggtcgctggtgaagcccgcggcgcgcgcctctcccggaccctgcagggtaaaagaatgtcacatgtcagcatttgtacctgaagtcagcatgcaaagttcagggtacctggatgaatgccaacttttgcatttcccatgtgtatcctgtgaccattctatctgggaacatccttcaaagagttcatgcatcttactgaggacacctgaccttttgaagcttcataattcacatctagatg

SEQ ID NO: 576 - DNA, 248 bp, Homo sapiens
  source 1..248: mol_type = other DNA
gctccttctagcatccttcatccttcaggtaccagccatccagacagtgcttgagctgcagaaactgagaccagacctctggcctggccctccccaggggcctcctttcgtatagtcactgcttctgcatcagatactttcagctgcaactccctactgggtggggcacccatttcaggcagaaggttttggtaccctccactgaccctacacccagggctgctactgccgcttgtggcttcaggatg

SEQ ID NO: 577 - DNA, 47 bp, Homo sapiens
  source 1..47: mol_type = other DNA
aggccttttgttcctgtcccggaaagccggcgtcctgccgcgcgatg

SEQ ID NO: 578 - DNA, 232 bp, Homo sapiens
  source 1..232: mol_type = other DNA
cctcctcctcctcttctcgccattgcagttggacccagcagcccggcgcgcaccgcgtggcttttgggggcagaccccggcgggctgtggcaggagggcggcggcggcggctgcggtcgaagaaggggacgccgacaagagttgaagtattgataacaccaaggaactctatcacaatttgaaaagataagcaaaagtttgatttccagacactacagaagaagtaaaaatg

SEQ ID NO: 579 - DNA, 122 bp, Homo sapiens
  source 1..122: mol_type = other DNA
gtttcctctgctctccgctctcgcccgctagctctcctcccttccgctcctgcttctctccgggtctcccgctccagctccagccccacccggccggtcccgcacggctccgggtagccatg

SEQ ID NO: 580 - DNA, 79 bp, Homo sapiens
  source 1..79: mol_type = other DNA
tgccctctgccgctgctcccgtctctttggttacgctcgtcagccggtcggccgccgcctccagccgtgtgccgctatg

SEQ ID NO: 581 - DNA, 160 bp, Homo sapiens
  source 1..160: mol_type = other DNA
ccgcctcttccttcccgttgtttaaggcagttggttgccctcctgtccgtcagaggtgcagtaccagaggtggcgtgctgccgatttcgcgtttgccttgctggatgattccgcttgtttgccggctgcgtgagtgcttagagcttttcggtggaagatg

SEQ ID NO: 582 - DNA, 34 bp, Homo sapiens
  source 1..34: mol_type = other DNA
ggctctctaccggtgagggtttgcggggaagatg

SEQ ID NO: 583 - DNA, 159 bp, Homo sapiens
  source 1..159: mol_type = other DNA
cagtctctgtgcgttgaagccggagaccgcggcggcctcagcgaggaccctccgccccggagccgccggccggagccgcagcctctgccgcagcgcccccgccacctgtcccctccccctccgcctccgccggagccgcctcgtgcactctggggtatg

SEQ ID NO: 584 - DNA, 216 bp, Homo sapiens
  source 1..216: mol_type = other DNA
gtgcctttttccgccgcgcgccaccagaatgtccctgtcttgaggtctaatggcggacgccagtatgttggagttggtggtggcttaagttttgaagggaggtagcatccgttggatatccacaccatccttctcgctgcaggctttcttggactccgtactgttggtgtaaccaaggcctggaggtctgggtggctcaggtttcctgcagccatg

SEQ ID NO: 585 - DNA, 163 bp, Homo sapiens
  source 1..163: mol_type = other DNA
ctgcctctcgctggaggccaggccgtgcagcatcgaagacaggaggaactggagcctcattggccggcccggggcgccggcctcgggcttaaataggagctccgggctctggctgggacccgaccgctgccggccgcgctcccgctgctcctgccgggtgatg

SEQ ID NO: 586 - DNA, 702 bp, Homo sapiens
  source 1..702: mol_type = other DNA
ttttcttttctgctttgcaggcccaggctcaaggcaaattataagtagggaaccaatttgagggaaagacatgtgaacagagttaaggtaccacgtcctgggagcgaccagcagccccacctgaagtccgcatgcaactctgacaagctcaggtgcttgttttaaggaaaggggctactagagtcttaccaacagcgagcccaggtgggagatgaaacaggtactccccaaaataggtcatccgagggaggaaaactgatggagagcacaatgtgctctgagcgtttttaatgtttttaagcttttaaatgatttcttcaaggccgagcagcagcagcaaaggtgtggcttaaaggattaagggggtttctgctgacacctagaatgaagttactctattactaatcaagccgagaggaggcccactatgcccccgtttatcatcctttcccagttcctttttgctggtcacaaaacgatgctcatcaatcccacctaaagcaggaggccaggagcccagcctcttgtagaaacagcgagggtataactgccctcccgttctgcccccaagacgaaggaggactctcggaagccaagaaaggtttaagaagtctttctggatagagagcagtgcccaggcaggaagcctttcgccggcagagcggggtccaaggacgagctggagaggacagaggcgcgatg

SEQ ID NO: 587 - DNA, 40 bp, Homo sapiens
  source 1..40: mol_type = other DNA
attcctttccttcctagccttggtcgtcgccgccaccatg

SEQ ID NO: 588 - DNA, 88 bp, Homo sapiens
  source 1..88: mol_type = other DNA
ccacctcttcctgttcccgtccttgaggacgccgtgccgggtcagtgttagcctccagccctggttgtggaaggcgacagaagtcatg

SEQ ID NO: 589 - DNA, 249 bp, Homo sapiens
  source 1..249: mol_type = other DNA
ccccctcccccgcggcgccgtctcctcctcccgcctgaggcgagtctgggctcagcctagagctctccggcggcggcgcagcttcagggcagcgcgggctgcagcggcggcggcggttagggctgtgtagggcgaggcctcccccttcctcctcgccatcctactcctccctcctcgtcatcctcccccttcgtcctcctcgccttcctcctcctcgtcaggctcgacccagctgtgagcggcaagatg

SEQ ID NO: 590 - DNA, 326 bp, Homo sapiens
  source 1..326: mol_type = other DNA
cttccttcctcacttcctctgcaggagggagcgagagtaaagctacgccctggcgcgcagtctccgcgtcacaggaacttcagcacccacagggcggacagcgctcccctctacctggagacttgactcccgcgcgccccaaccctgcttatcccttgaccgtcgagtgtcagagatcctgcagccgcccagtcccggcccctctcccgccccacacccaccctcctggctcttcctgtttttactcctccttttcattcataacaaaagctacagctccaggagcccagcgccgggctgtgacccaagccgagcgtggaagaatg

SEQ ID NO: 591 - DNA, 69 bp, Homo sapiens
  source 1..69: mol_type = other DNA
cttccttccgtctcgctcggagtttccctctgcgttcgctccgcgctgctggaggctgtcgtcccaatg

SEQ ID NO: 592 - DNA, 321 bp, Homo sapiens
  source 1..321: mol_type = other DNA
cctccttctgttgcttcccgtctcctcggcggctcccctcccccgcccggctctccgcgccccttctgggcggcggggcggcggagccgtcggcgtgcggccctccttgcgttcgtgcgtgcgcccgtggcccggcgcacgtcccgcgacaccgaggccgagcggggcagggggctgaccgccatgaccccccagagcccggcgtgagggggccgagatgcggtgacctgccagcacctgccgcagccttcgtccgggagtcgccccatctctccacgcatcggggccctgtgccccttgctgctgcagccgggcaccatg

SEQ ID NO: 593 - DNA, 116 bp, Homo sapiens
  source 1..116: mol_type = other DNA
gtgtctctcggcggagctgctgtgcagtggaacgcgctgggccgcgggcagcgtcgcctcacgcggagcagagctgagctgaagcgggacccggagcccgagcagccgccgccatg

SEQ ID NO: 594 - DNA, 96 bp, Homo sapiens
  source 1..96: mol_type = other DNA
cgttctctcctccttcctccccgcctccagctgccggcaggacctttctctcgctgccgctgggaccccgtgtcatcgcccaggccgagcacgatg

SEQ ID NO: 595 - DNA, 55 bp, Homo sapiens
  source 1..55: mol_type = other DNA
aggcctctgtcccccaccccctttccccggtcccaggctctccttcggaaagatg

SEQ ID NO: 596 - DNA, 274 bp, Homo sapiens
  source 1..274: mol_type = other DNA
cggcctttttttcccggctgggctcgggctcagctcgactgggctcggcgggcggcggcggcggcgccggcggctggcggaggagggagggcgagggcgggcgcgggccggcgggcgggcggaagagggaggagaggcgcggggagccaggcctcggggcctcggagcaaccacccgagcagacggagtacacggagcagcggccccggccccgccaacgctgccgccggctactccctcttgatgccctcccctttgcccctcactcaggatg

SEQ ID NO: 597 - DNA, 28 bp, Homo sapiens
  source 1..28: mol_type = other DNA
tcatcttttccccagaggcgtcggaatg

SEQ ID NO: 598 - DNA, 444 bp, Homo sapiens
  source 1..444: mol_type = other DNA
aattctctctctttggctccctccttccgcgcgagtctctggagaagccgcagcgcgagttgccgccgctgctgcccggggccgggtaagtgggcctcactcagagcccgaccctcttggccccggcttgcgtcgacccccgccgggcaccgagcctgcgccgcgcgcggcccgggcgtcggggccgcgcccgaccgggaaaggccgggaagccggttgggcccgatcctcctggcagctagaacgggccgggcgggggaggggggaaccgagcagagcttagggggtggggcctcggagccaggccatgtcggggctcctcaagaagagggccagtgggactgctggggtcgggctggaggggatctgattgggggaagcgtctggggactgcttggggcctgattgggggacgtcgcgaggatcggcttgccttgcgccatg

SEQ ID NO: 599 - DNA, 31 bp, Homo sapiens
  source 1..31: mol_type = other DNA
gggcctttgctgtgtgggataaacagtaatg

SEQ ID NO: 600 - DNA, 81 bp, Homo sapiens
  source 1..81: mol_type = other DNA
ctgtctcttcgccggttcccggccccgtggatcctacttctctgtcgcccgcggttcgccgccccgctcgccgccgcgatg

SEQ ID NO: 601 - DNA, 362 bp, Homo sapiens
  source 1..362: mol_type = other DNA
cctccttttcctgcccccagactagaggcgggatgtagtctcttaggctaagagtgattggtcacaaggagactcggaagtgtctgatcagagccccagaggaggccttgagagcctgttggcgtaccgttccacacttggatccaggaatcgggcgtgttccaggctgctctctatggtagctttgggcggatagagggggcgcgcaaagtattaagggacaataatggccgctttcaaggtgtggattttggctccttgagcctgtctgagcgaggggtggcagcgccggcgccccagaatccgggacagaagggtcccaagagtcgcgcttggtgagagaaatcccagatcctgtgatg

SEQ ID NO: 602 - DNA, 130 bp, Homo sapiens
  source 1..130: mol_type = other DNA
catcctctaagcttttaaatattgcttcgatggtctgaatttttatttccagggaaaaagagagttttgtcccacagtcagcaggccactagtttattaacttccagtcaccttgatttttgctaaaatg

SEQ ID NO: 603 - DNA, 25 bp, Homo sapiens
  source 1..25: mol_type = other DNA
gctcccctctcacgcagccaacatg

SEQ ID NO: 604 - DNA, 163 bp, Homo sapiens
  source 1..163: mol_type = other DNA
catccttttagcaccgcgagaggcgccggtgtttcgagccgtggcaccggcatcggctgacactgctgcctccagctagttatttcgtcctcttccgttcttcacccctacaccttggaggtgaacttctcacctgagggctgtaaagactcgtttgaaaatg

SEQ ID NO: 605 - DNA, 43 bp, Homo sapiens
  source 1..43: mol_type = other DNA
cgtccctcaccgcaccacccctaaagacgctagcgctgcgatg

SEQ ID NO: 606 - DNA, 82 bp, Homo sapiens
  source 1..82: mol_type = other DNA
gggcctctgcattgcccgactccgtaggagcgcgggggcggctcctgctcttcctggactcctgagcagagttgtcgagatg

SEQ ID NO: 607 - DNA, 90 bp, Homo sapiens
  source 1..90: mol_type = other DNA
ccgcccttccttcttctcccagcattgccccccccacgtttcagcacagcgctggccgcagtctgacaggaaagggacggagccaagatg

SEQ ID NO: 608 - DNA, 101 bp, Homo sapiens
  source 1..101: mol_type = other DNA
ccatctttccgtcccgggcagccagcgccagtcggagccagcgcgagccgccgccgccatcactgccgctgccaagtcctccacccgctgcccccgccatg

SEQ ID NO: 609 - DNA, 59 bp, Homo sapiens
  source 1..59: mol_type = other DNA
gattctctttccgcccgctccatggcggtggatgcctgactggaagcccgagtgggatg

SEQ ID NO: 610 - DNA, 121 bp, Homo sapiens
  source 1..121: mol_type = other DNA
aactctttcttcggctcgcgagctgagaggagcaggtagaggggcagaggcgggactgtcgtctgggggagccgcccaggaggctcctcaggccgaccccagaccctggctggccaggatg

SEQ ID NO: 611 - DNA, 44 bp, Homo sapiens
  source 1..44: mol_type = other DNA
gcgccctttcccctgccggtgtcctgctcgccgtccccgccatg

SEQ ID NO: 612 - DNA, 154 bp, Homo sapiens
  source 1..154: mol_type = other DNA
ctccctccccgcgccccgtcctctcccgccctacaggccctagcagggcaggcgggaggtgagcgcggccatcccgctcccggagttccgggatcctggagtccgtagttcgtggtccttcgccggtgtccccggagcccagcggctgtggatg

SEQ ID NO: 613 - DNA, 23 bp, Homo sapiens
  source 1..23: mol_type = other DNA
cctccctttctcctgcagccatg

SEQ ID NO: 614 - DNA, 146 bp, Homo sapiens
  source 1..146: mol_type = other DNA
cctccttttctcccgccggctctaacccgcgcttggctaaggtccgcgggaacccgtgagccaccgagagagcagagaactcggcgccgccaaacagcccagctcgcgcttcagcgtcccggcgccgtcgcgccactcctccgatg

SEQ ID NO: 615 - DNA, 187 bp, Homo sapiens
  source 1..187: mol_type = other DNA
gcgtctctttcgctccgtgtcccgctgctgctcctgtgagcgcccggcgagtccgtcccgtccaccgtccgcagctggtagccagcctgcccctcgcctcgactccctttcaccaacaccgacacccacattgacacctccagtccggccagccgctccactcgttgcctttgcatctccacacatg

SEQ ID NO: 616 - DNA, 683 bp, Homo sapiens
  source 1..683: mol_type = other DNA
cgccctcttttggtcgccccctccccaacccagcactaaggagcaccctgctctggtctccgccaccacccagcgcctcctggacccatccccccaaacccttgaacgtcctcaggacccccaggtgagcgcggcgcgctgcgggcggggaccctctctgcacctccccgcacccctgggggtcgctctgtccctacggtccccgcctcccctttctcctttctaagcgcctcgcgcccaggccgccgcccggggtggcgcagcccgcagccctcccgctccgggcgccctccgccgctccgagaccccctgggggcgcgtcctctcccgctcccctgttccctcccccggctcagggcgggcgcgtggtcccaggggaggctcccgcccagccccgcactcctttgtgcggccgggcgggcgctgcgtcaaggtggaggcgcggccacacgcgcgcacccacccgcgcgcacccagcccccgggagaggcaggaagggaggcggcggcgcgaggaggagggagcggccgtggagcccaatcgttcgctccccttcccgggtccgcgcgcggcgccgcctccgccattgctgcgagcaggagcaggagacgcggagctcggagcgctcagctgacctgccggagccgggcgtgggctgcagcctcggagctcccggaacgatg

SEQ ID NO: 617 - DNA, 152 bp, Homo sapiens
  source 1..152: mol_type = other DNA
acgtcctttcgatgttgcgtcatgcagtgcgccggaggaactgtgctctttgaggccgacgctaggggcccggaagggaaactgcgaggcgaaggtgaccggggaccgagcatttcagatctgctcggtagacctggtgcaccaccaccatg

SEQ ID NO: 618 - DNA, 322 bp, Homo sapiens
  source 1..322: mol_type = other DNA
tttccttcctctttcactccgcgctcacggcggcggccaaagcggcggcgacggcggcgcgagaacgacccggcggccagttctcttcctcctgcgcacctgccccgctcggtcagtcagtcggcggccggcgcccggcttgtgctcagacctcgcgcttgcggcgcccaggcccagcggccgtagctagcgtctggcctgagaacctcggcgctccggcggcgcgggcaccacgagccgagcctcgcagcggctccagaggaggcaggcgagtgagcgagtccgaggggtggccggggcaggtggtggcgccgcgaagatg

SEQ ID NO: 619 - DNA, 154 bp, Homo sapiens
  source 1..154: mol_type = other DNA
cggtctcctcacttccggcttcgctgctcttggttctggttctggaggctgggttgagaggtcgccggtccgactgtcctcggcggttggtcagtgtgaatttgtgacagctgcagttgctccccgcccccgagcagccgaggagtctaccatg

SEQ ID NO: 620 - DNA, 449 bp, Homo sapiens
  source 1..449: mol_type = other DNA
ccgccccttcggcgccaccacgtgtgtccctgcgcccggtggccaccgactcagtccctcgccgaccagtctgggcagcggaggagggtggttggcagtggctggaagcttcgctatgggaagttgttcctttgctctctcgcgcccagtcctcctccctggttctcctcagccgctgtcggaggagagcacccggagacgcgggctgcagtcgcggcggcttctccccgcctgggcggccgcgccgctgggcaggtgctgagcgcccctagagcctcccttgccgcctccctcctctgcccggccgcagcagtgcacatggggtgttggaggtagatgggctcccggcccgggaggcggcggtggatgcggcgctgggcagaagcagccgccgattccagctgccccgcgcgccccgggcgcccctgcgagtccccggttcagccatg

SEQ ID NO: 621 - DNA, 444 bp, Homo sapiens
  source 1..444: mol_type = other DNA
ccccctcttctgcagcagacggactgagttcctctaatccctgtgttccttctcccccatctttctaaaacccttctctgagagaggaataactatagcttcagggataatatagctttaaggaaacttttggcagatgtggacgtcgtaacatctgggcagtgttaacagaatcccggaggccgggacagaccaggagccactcgttctaggaatgttaaagtagaaggttttttccaattgatgagaggagcagagaggaaggagaaagaggaggagagagaaaaagggcacaaaataccataaaacagatcccatatttctgcttcccctcacttttagaagttaattgatggctgacttctgaaagtcactttcctttgccctggtacttcaggccatatacatcttttcttgtctccataatcctccctttcaaggatg

SEQ ID NO: 622 - DNA, 84 bp, Homo sapiens
  source 1..84: mol_type = other DNA
acctccctttctctgctcagctccagcgtcatttcggcctcttagttcttctgaaccctgctcctgagctaggtaggaaacatg

SEQ ID NO: 623 - DNA, 77 bp, Homo sapiens
  source 1..77: mol_type = other DNA
gggtctcttccgcggaaactgacattgcgtttccgttgtcggcctcccactgcaggagccatatattgaagaccatg

SEQ ID NO: 624 - DNA, 371 bp, Homo sapiens
  source 1..371: mol_type = other DNA
ccaccttttcttgggcttgtaggaaggtggacatgggctcccggagacaagacaagtgatatgttgaactgttcggtggctggaatcaactgctcctggagtgacctaaggccagtgtttatcagaacttagccagggccagccaagcaggcacagatgctctgctatgaaatgccacgcaggcagagactgacaagcggtaggaactgagctttccccttggactgctgcttcctgctgtgttcaggggagggggtcactttctggcaactctgctgctgctgctgctgctgctgctacttcagcttcctctccactcaaggtaagcaggctaagggagggcaggctgctagggaaagctttgtaccatg

SEQ ID NO: 625 - DNA, 49 bp, Homo sapiens
  source 1..49: mol_type = other DNA
tggcccctcttctcacatcagcgggtccaggcccaaccgacagactatg

SEQ ID NO: 626 - DNA, 206 bp, Homo sapiens
  source 1..206: mol_type = other DNA
cgtcctccccgctccgggccccacccggctcagacggctccggacgggaccgcgagcacaggccgctccgcgggcgcttcggatcctcgcgggaccccaccctctcccagcctgcccagcccgctgcagccgccagcgcgccccgtcggcagctctccatctgcacgtctctccgtgaaccccgtgagcggtgtgcagccaccatg

SEQ ID NO: 627 - DNA, 387 bp, Homo sapiens
  source 1..387: mol_type = other DNA
cgccctcttcttccagactctcggtctgtccgctgggggcgcgcgcggtgtgtggcaggcggcagcggcgctggcggccgagtgcgcttgtcacgcgtggcggtgcgtggttgctaggggcgcctgaggctgccgggtagcccagcaggccgagggaggaagtagcgtggagccggtgccgagccggggcgaagctggatcccctagatagactgtcttcaagctcactgatattttcctctgcttgatccattgtgctgttgagagcctctagtaaatttttcagactgacagacttcaaggatgcagctgctactaccggaggtgtgtggcaccttacctcagcaaggccatgagaccgtgtggccatgatgtgggcccctcatg

SEQ ID NO: 628 - DNA, 116 bp, Homo sapiens
  source 1..116: mol_type = other DNA
acctctccctcctcctggcgttagttccggtcgcagaggagacaccgccgcagttgccggtacatcggggatttctggctctttcctcttcgccttaaattcgggtgtcttttatg

SEQ ID NO: 629 - DNA, 209 bp, Homo sapiens
  source 1..209: mol_type = other DNA
ttgccctttctgtgtaagctgtgagcgtaggcggccctgagggggtgtgttgcaggggtttccaagcccagcaccagcacccttgcccttttccatcaggggttcagcctagggtccccgctggtgggcggctcccgagtcttggagaagagcacgagaacctagaccgcccccgaagtgcggagaccccctgggcaggctgaaagatg

SEQ ID NO: 630 - DNA, 197 bp, Homo sapiens
  source 1..197: mol_type = other DNA
ctgccctttgcctcctgggcggagaagctgcttcctcctgggaacaaccgcctcccgctcctagcaggttgctactgccccgaacccgcgctgcagggaacagcggggcaaacagtgagtggggttcagcgtagactctggaccaggagaggcccgcggtgaccgaggcctgggccccggaaaccaatagagccatg

SEQ ID NO: 631 - DNA, 434 bp, Homo sapiens
  source 1..434: mol_type = other DNA
agccctctttcaccccccccccccggccattaccgaagcggatgaaaacaaacactaacgatggcggcgccgggaagcgaccggctgctgggcttaaggcgggagtgaccgcttaaccagtgagggaagcactgaagagcgccagtcgacgtgggtgcgacaactcgcggagtcttaggagcaaaacgtctggggcctgcgagccaggacccttctgaagccttaggtgtctatcggcgacgtgtacggtcactgcagctccggagcgcggaaccctcagccaggaggcgcggctggtcggtcccaggtcccggcctccgtaatgagagcccggaaccactctttgtgccgcagcttcgcagcatcttggactcaagtgattctcctgcctcagcctcctgagtagctgggactacagattcctataggcaatg

SEQ ID NO: 632 - DNA, 142 bp, Homo sapiens
  source 1..142: mol_type = other DNA
ccgccttcccacatcggatcgcagggctcccaaaatggcgagtgaggctgcggggactcgctgagcagcggagggggagcgtgcagagccgctgcggccctcacagtccggagcccggccgtgccgtgccgtagggaacatg

SEQ ID NO: 633 - DNA, 340 bp, Homo sapiens
  source 1..340: mol_type = other DNA
cgttctttctcccttctctgcctctctctcctccacgctgctttgatttcgctcttgcctctcttcttgcgctgctcagctgggaacatcgtctcaccaggggcagcagcgacgcgctgcacagccagacaggagctggctgcggggcatggaagcagcctccttggcagccgggagaggagcaagcgcacgccactgcccgtgacccaggcgtccggctgctgtcccctgccggggagctcatccacgcagaggtctctccctgtcctccctgcgagcttttcctctgcagagcccagtggagccagtccccacaggagacaaccctgacgggagcatg

SEQ ID NO: 634 - DNA, 129 bp, Homo sapiens
  source 1..129: mol_type = other DNA
cggcctttctgtgttcctggcccgcggccgtcgggtgtgagctgcgccgaccgctctgagggttcgtggcccaccgctccttcgcggtccctgccgccaccgtccacgctcagcgttgtagagaagatg

SEQ ID NO: 635 - DNA, 78 bp, Homo sapiens
  source 1..78: mol_type = other DNA
cggcctttctagccgctgtcccaagggttggtctcgcgctttcggctgcgagctctctgtggtgctggcagcgacatg

SEQ ID NO: 636 - DNA, 188 bp, Homo sapiens
  source 1..188: mol_type = other DNA
ctccctcctttaaacagcttctccgggtctcagcatgggcttccagggcagcgattgaggagaccttaccaaggagcaccacacagtagatgctgagacatcgtactccaggataagaaacagtaacatggcagcacctgcttgaaagaaattaaaaaccaacagactccatttagaaaggaacaatg

SEQ ID NO: 637 - DNA, 61 bp, Homo sapiens
  source 1..61: mol_type = other DNA
cctcctctccccttgcggcctttctaacgttggccctgctcttgtggcctcccgcagaatg

SEQ ID NO: 638 - DNA, 256 bp, Homo sapiens
  source 1..256: mol_type = other DNA
cggtctttgccgttaccgctatgtgtggggcgtgtgtggaataacgttattgcccagcggagctgagggccccggagctcgaccgcagcggcagcgacgacaacagcggcgacgacgacgacgacgaggtggggggaggacggcgtgcgagagactcacgggacgcgacgcgccccgcctcccccgtccggtccctctctccacggtaaggggatgacgtagctttgccaaagacttagaagctaagcagaaaatg

SEQ ID NO: 639 - DNA, 327 bp, Homo sapiens
  source 1..327: mol_type = other DNA
aggcctctcgaggtccagacagccgcccagcccgctctgcgacgcagcagtgaatagtgtggtacctccttgtctcggttcaggtccagacctccccgtcttccggctgccctgaacgtcaggcgacctcaggaccctgtgattggcgcctgcgccggcggaccgtgaccgaggaaacccctggagggacttgggcattccttgggctccgtgcctgttcttcgtgctcctttcgggcaaggatctcacattatcagtctttgaccgacacagaatgcctggcatttgataaatgtttgttgaacttgaagagacatatggacaatg

SEQ ID NO: 640 - DNA, 83 bp, Homo sapiens
  source 1..83: mol_type = other DNA
ttttccttttcatttcagcctgactgccggaatcagagccgcgggtgagatccccagccctgtgagcctgtaggagtagaatg

SEQ ID NO: 641 - DNA, 472 bp, Homo sapiens
  source 1..472: mol_type = other DNA
ggttctttgagatgctgtttggcgactcgtcgccattcccggagcaggtcggcctcggcccaggggcgagtatccgttgctgtgtcggagacactagtccccgacaccgagacagccagccctctcccctgcctcgcggcgggagagcgtgtccggccggccggccggcggggctcgcgcaacctccctcgcctccccttcccccgcagcctccgccccgccaggcccggcccggactcccgagccccggcctcctcgtcctcggtcgccgctgccgccgggcttaacagccccgtccgccgcttctcttcctagtttgagaagccaaggaaggaaacagggaaaaatgtcgccatgaaggccgagaaccgctgccgccgccgacccccgccggccctgaacgccatgagcctgggtccccgccgcgcccgctccgctccgactgccgtcgccgccgaggcccccgttgatg

SEQ ID NO: 642 - DNA, 301 bp, Homo sapiens
  source 1..301: mol_type = other DNA
agcccttcttgattggaagaagcgcctcggaccccggtccttggcgccgtagtggttaggttgagccctaggcgtgggggagaactggggaaactggaatttcccgcggagctgacagcgcttgcgctccccctactcgttctaattccacgcgctccaaaatatccgccatggagaaatcttggccaggatgtccattctaggcccatcggtgctgtcttgctgaaggttgggtcaggcatctaaagggactgtggtaagggagggtgtgacacaggtgtaagctgccatcgtcatcatg

SEQ ID NO: 643 - DNA, 51 bp, Homo sapiens
  source 1..51: mol_type = other DNA
gctcctctccggccgcgcagccgctgccgcccacccgcacccgccgtcatg

SEQ ID NO: 644 - DNA, 116 bp, Homo sapiens
  source 1..116: mol_type = other DNA
gactctttcctgtcccggcctgcgtggtgtgggcttgtgggtctttgagacccgaaaattgagagcgttttcgcactccagcggctgctcctggcggctctgcggccgtcaccatg

SEQ ID NO: 645 - DNA, 58 bp, Homo sapiens
  source 1..58: mol_type = other DNA
acgccttttgctggaagagcgctgctggggttaggattctgcgcggcgaggcaagatg

SEQ ID NO: 646 - DNA, 267 bp, Homo sapiens
  source 1..267: mol_type = other DNA
cctcctctgcgagcgttatttcaaaagaagttgagaaccagagaaaccgacctaaggggattctcccatttggcccgtcctaccctaaagtcaccacctgctgcttttctggagcgcttaccagtgaccaagaggaacagaacacagagcagcctggcagtgtccaagcaacaagcctccgctcctccttcctgcaccctggggctcctgaaactcacatgggtaaaaaagatacagtaaagacataaataccacatttgacaaatg

SEQ ID NO: 647 - DNA, 358 bp, Homo sapiens
  source 1..358: mol_type = other DNA
ccgcctctcgagcgctgccggtggccgcagcggcgcacccacgccggcccggaggagcagagtgttcatttctgtgtcgggcacagtgctaagtgctgggtgctcactggtgatgaggcagatgaaggttaccaaacttgtggacaggagcctcatatcagagacgtggacctcactgtagcctggtcatggcttccagcttttcgaatctgaggctccaaaggaggaaatgaccattcagggatcttactccagcttgattacggagactgaaccttcatagggtgcgcacttaccaaggacaggaaggtttctctgtttgaagggctttaaacttataacaaagaaaataaaaatg

SEQ ID NO: 648 - DNA, 181 bp, Homo sapiens
  source 1..181: mol_type = other DNA
ccgcctctcaaccatcaggttcggcagcccgcggcgccgcctggcagctcctcctcttctccgccccgccggccgcgggcgcgggggacgtcagcgctgccagcgtggaaggagctgcggggcgcgggaggaggaagtagagcccgggaccgccaggccaccaccggccgcctcagccatg

SEQ ID NO: 649 - DNA, 85 bp, Homo sapiens
  source 1..85: mol_type = other DNA
ccttcctttctccctctgcagacacaacgagacacaaaaagagaggcaacccctagaccaccgcgaaggacccatctgcaccatg

SEQ ID NO: 650 - DNA, 26 bp, Homo sapiens
  source 1..26: mol_type = other DNA
tgttccttttggtacgctccaagatg

SEQ ID NO: 651 - DNA, 131 bp, Homo sapiens
  source 1..131: mol_type = other DNA
tcccctccttccagcgcctttcggtggagcactgcggcactcagcccgagctgccgttttcccctcgcggggaacgctgtgacccccccgcaggagcggcggggcggggtgggggggcccgggagaagatg

SEQ ID NO: 652 - DNA, 96 bp, Homo sapiens
  source 1..96: mol_type = other DNA
gctcctttccgtggtgtgtagccggcttggcgtgaccctcgcctgatccagttgttagagttggaagcttggcagttggcctcccttcttcccatg

SEQ ID NO: 653 - DNA, 291 bp, Homo sapiens
  source 1..291: mol_type = other DNA
cttcctttcctagttgggttctgacagctccgaggcagtggtttacacaaccaacacgaaacatttctacgatccacccgattcctcccctcattgatattcaggaagcagctctccttcccctgccttcagctcaagtttgctgagcttttgtttcatttgtgaatacttcttgctggaagtccctcacccagagaccagtgctcccaacggcagagcagcgggggagataaagaactggtgacacgtggctgtacattcagcacagctgtggtgtccccaagtgccatg

SEQ ID NO: 654 - DNA, 125 bp, Homo sapiens
  source 1..125: mol_type = other DNA
ctttcttttccggattgggcatcccggcatctgcacgtggttatgctgccggagtttgggccgccactgtaggaaaagtaacttcagctgcagccccaaagcgagtgagccgagccggagccatg

SEQ ID NO: 655 - DNA, 30 bp, Homo sapiens
  source 1..30: mol_type = other DNA
cgctctctgctcgcgcttgggctcgcgatg

SEQ ID NO: 656 - DNA, 29 bp, Homo sapiens
  source 1..29: mol_type = other DNA
gcgccttttctgacgatgcgaacaacatg

SEQ ID NO: 657 - DNA, 78 bp, Homo sapiens
  source 1..78: mol_type = other DNA
ccgccttctgccctcagcagcagacgctctgtcccgcccgggcagctctgcgaggcagcggctggagagggaaccatg

SEQ ID NO: 658 - DNA, 135 bp, Homo sapiens
  source 1..135: mol_type = other DNA
gcttctcctttttgtgttccggccgatcccacctctcctcgaccctggacgtctaccttccggaggcccacatcttgcccactccgcgcgcggggctagcgcgggtttcagcgacgggagccctcaagggacatg

SEQ ID NO: 659 - DNA, 271 bp, Homo sapiens
  source 1..271: mol_type = other DNA
caccctcttgcccggtccccgggagggccggtccgctcctcccggacgccgaggacctaccaccgcgacttcgccccgcccggcgcgggcccaggaccctgatgtcgcttttgaacagcccctgcacctggcagccagcgagctactgtagtaggcattgccgactgtttgcataccggatgggagtgacagtgtaatagaaaaacaagcaagaaaccttttaggtaggactcctaaggctcagaggaagttacctccagccgctgccatg

SEQ ID NO: 660 - DNA, 209 bp, Homo sapiens
  source 1..209: mol_type = other DNA
ccttccctttcccggctcaagtccttcctctctctttcctttctttccgcctatcttttttctgctgccgctccgggtccgggccattttccgggccgggcgcactaaggtgcgcggccccggggcccagtatatgacccgccgtcctgctatccttcgcttcccccgccccatgtggctgcggggccgcggcggcgctgcccactatg

SEQ ID NO: 661 - DNA, 31 bp, Homo sapiens
  source 1..31: mol_type = other DNA
ccgcctttcgtaagtccccccgcctcgcatg

SEQ ID NO: 662 - DNA, 37 bp, Homo sapiens
  source 1..37: mol_type = other DNA
caacctcttctctcccgcttctctcgctgtgaagatg

SEQ ID NO: 663 - DNA, 272 bp, Homo sapiens
  source 1..272: mol_type = other DNA
ctcccttctgctggaccttccttcgtctctccatctctccctcctttccccgcgttctctttccacctttctcttcttcccaccttagacctcccttcctgccctcctttcctgcccaccgctgcttcctggcccttctccgaccccgctctagcagcagacctcctggggtctgtgggttgatctgtggcccctgtgcctccgtgtccttttcgtctcccttcctcccgactccgctcccggaccagcggcctgaccctggggaaaggatg

SEQ ID NO: 664 - DNA, 142 bp, Homo sapiens
  source 1..142: mol_type = other DNA
actcctctagccggaacctgggggcccggagccggggtaggcacagagttgtcctcggaggtccaggacagcggccagcccggcggcgggagtcagggccacgccacctgcagggaagaacccgagtcgaagcgggaagatg

SEQ ID NO: 665 - DNA, 190 bp, Homo sapiens
  source 1..190: mol_type = other DNA
cttcctcttgcagttgaggccggcgccgagccggacttcaggcggatctcgtggcggagcccatcttgctccctctcccaggcctttacccgctccctaggattcccgggccctgtaggtgggagttgggagacgacagtactgcttttaaagagacagtgttagggatcttggaagcacagccaacatg

SEQ ID NO: 666 - DNA, 84 bp, Homo sapiens
  source 1..84: mol_type = other DNA
gctcctttccactcgggaaaccttcagaggagtctcagaaaggacacggctggctgcttttctcagcgccgaagccgcgccatg

SEQ ID NO: 667 - DNA, 219 bp, Homo sapiens
  source 1..219: mol_type = other DNA
gcccctccctctccgcccccaccccctgtcggcgtctgggcctcgtccccttctctctgtctcccttgcctcccccatcacgtcccctgacaccgacaccccattgctcccacagtctccccagtctccactttggtccccagcgctgtctgcccgaggatttgcctgaaggctgcccccaactctgcacccgccccccgagggccaccgaggaccatg

SEQ ID NO: 668 - DNA, 300 bp, Homo sapiens
  source 1..300: mol_type = other DNA
cacccttcccgaagtttttctgtcacctgtgttaggctccgtcccctttccgcgttttatccccgtaccagaaaaggatacatttagtgcctcccacccagctccactaaacgggttggatatctcattctttgagttggtgttccttccccggcgcccccatgtagctgggaagtgggacctgggggtggttggacccctgggatcctaaaggaggggcagggagggcgcagaactccgcttctgctccttgctaccaggacgcgcggcctcctcagcctctttcctcccgctgccatg

SEQ ID NO: 669 - DNA, 133 bp, Homo sapiens
  source 1..133: mol_type = other DNA
cgttcttccgggaaaatggcgactcccgctcgtgccccggagtcaccgccgtccgcggatccggcgctagtagcggggcctgccgaggaagccgagtgcccgccgccgcgccagcctcagcccgcgcagaatg

SEQ ID NO: 670 - DNA, 226 bp, Homo sapiens
  source 1..226: mol_type = other DNA
tcgcctctttccgccagcgcccgcaggacccggatgagagcgcacgcttcggggtctccgggaagtcgcggcgccttcggatgtggcggatgcggccgtgagccggcgggggaggtgctgctgctgcctccactgtactcagacccaggtagcacaggattgtccatcctccagcagctcagtgcaacggtgtgaactcagcctgtttcagagcctccacaccatg

SEQ ID NO: 671 - DNA, 126 bp, Homo sapiens
  source 1..126: mol_type = other DNA
cgatctctgcggggcaagatggcggcgcccagacaggcctggagcacggatgaataagagggaacccccacacggagacactgctggagagagtcgtactggggaggcagctggagcagcaagatg

SEQ ID NO: 672 - DNA, 285 bp, Homo sapiens
  source 1..285: mol_type = other DNA
cctcctctttggtgcctccagccaggaggcgggagcgatccacagcagctgacccagctcaggcactgcctctctcacagccctcaagacacaccatgggcccagaggcaggtttgctacacagcagcgacgacgcaggcggcggccccagcgactcgcaactgcctccctgaccacagcggccaccgcccaacacccccgagaagccatcgccaccaccggcaggagaacctagggtccataaagccatcttcgcgatcgactaaagctacgtcaacaactatg

SEQ ID NO: 673 - DNA, 109 bp, Homo sapiens
  source 1..109: mol_type = other DNA
ccccctctctcggcccggccatcttgtgggaagagctgaagcaggcgctcttggctcggcgcggcccgctgcaatccgtggaggaacgcgccgccgagccaccatcatg

SEQ ID NO: 674 - DNA, 48 bp, Homo sapiens
  source 1..48: mol_type = other DNA
caccctttctgcgggggacgatttcgtcggtggtaggctgctaccatg

SEQ ID NO: 675 - DNA, 29 bp, Homo sapiens
  source 1..29: mol_type = other DNA
gcgcctcttcacgaggtggaaacaagatg

SEQ ID NO: 676 - DNA, 55 bp, Homo sapiens
  source 1..55: mol_type = other DNA
cttcctcttcctgggcagcctcgggacggggcgccgcggccgggcgggcagcatg

SEQ ID NO: 677 - DNA, 171 bp, Homo sapiens
  source 1..171: mol_type = other DNA
acttcctttgcctgctcaccgccagcgtaggtgctaccaccgctgccgtcgccgccgccattttgatggcaggaagagtccggttctgggacagctggagacagtggtggtgactgaaataactttaccaaaggaaagctattttgcgaactatcttctccagcggagatg

SEQ ID NO: 678 - DNA, 21 bp, Homo sapiens
  source 1..21: mol_type = other DNA
agttcttcctttgacaagatg

SEQ ID NO: 679 - DNA, 205 bp, Homo sapiens
  source 1..205: mol_type = other DNA
cagtcttctcgagcacatcgtcgcaaacggggccggaaagcgtggcagcgcaggcgcaagcgcagagagcggaggcggtggtggtggcggccgctggccagttccttcagtgaatctacagacctattttctcaggagctcagcctggccttacttcagtgataaaaggaggaaaggctggctacagcaaacatcattcaagatg

SEQ ID NO: 680 - DNA, 157 bp, Homo sapiens
  source 1..157: mol_type = other DNA
ctttcttctcgtcggtgttcccggctgctatagagccgggtgagagagcgagcgcccgtcggcgggtgtcgagggcgggttgcctcgcgctgacccttcccgccctccttctcgtcacacaccaggtccccgcggaagccgcggtgtcggcgccatg

SEQ ID NO: 681 - DNA, 749 bp, Homo sapiens
  source 1..749: mol_type = other DNA
ccgccttctcacactttcaggctctgatcgcggccgcagtttttccttttttcttctgccgtcgccttctctgcctcttctcatcctttctcgctctgctgctctgcagtgtgacgagtccgaatcctcttcccacccagcccgcgcctttcttcttttgcctgcgctgttctatttctccttcggccgccgccgccactgctgcacacagctggtgtcggtgccgcgcttttacccccaagtcgttcccgcagcctatggcccaggccgccttgggtatttctgctcaaggtaaccacatccctctttaaaaattccgccgaaaaagagaagacgctttacccgactctttgggccgttatctcacggcgaactttctgaccaagtatacaactacccagagggcctaggagaagtgctgtatagagagcagttcgacttcaacgctgagccaccttgggaacctagctgatgataggggggttccatctcccaacttgtccatggaggtcttcacttcagaaatccaagactcatattcatccagcttggtgtcaagtgggctgttgctgccagaattatcttgtgattatttgagagatgtatcagtttcttctgaagtacaatcaactgtagaagcctttgtagcagtttgttgcatattctaaggacccagacataggcttggtggcccgtctcttgtctttcctggtttatgactttcggctttgtggaatacggctgagatg

SEQ ID NO: 682 - DNA, 55 bp, Homo sapiens
  source 1..55: mol_type = other DNA
gcctcttcttcttccgccctggcagggtctccgcagaagatttgttgccgtcatg

SEQ ID NO: 683 - DNA, 44 bp, Homo sapiens
  source 1..44: mol_type = other DNA
gcgcctctccagcctccgcaggcccaaccgccgccagcaccatg

SEQ ID NO: 684 - DNA, 69 bp, Homo sapiens
  source 1..69: mol_type = other DNA
tttcctcttttgtgctgattcctgaggactaggaaggtgccccgaaaagaattcagagacctgacaatg

SEQ ID NO: 685 - DNA, 541 bp, Homo sapiens
  source 1..541: mol_type = other DNA
ctctcttttctggagttagattagtctgaagccgccaccagccccaggcccccgtgcagaagaaaagcgggagggaacggcggaggccgccgctgccctgcaccgccctcctggaggccacttggagagtccggccccgaggaggccatggccacaagtgcccacagctggccccaggttgccagcgtcgctacagcccagaccaaggcagaataatctccggatgagctggtggcaccgctgagcctttggtctcaccagggcttcctgttgctggcaggcggggtggagcggagctgctgggaggctgctggataggagaggggtcacggctgcggaagaggaggttcttcgggacacccgtggatggacacggcaaggaaacaccaggccaaccacagctggggataaaatagcacaaccacaccctgccgtccagcgcctcccagcctgtgccccttcctagtaccaccagcaaccatcaatcccgtctcctcctgcctcctctcctgcaatccaccccgccacgactatcgccatg

SEQ ID NO: 686 - DNA, 126 bp, Homo sapiens
  source 1..126: mol_type = other DNA
tcttctctgtggcggagacagccaggttggcagctgacgggacagccggggtctattttgttgcgggttttcagcaaatccagggctggtctggaggcgcgaaaacttaaggcatacagaacgatg

SEQ ID NO: 687 - DNA, 286 bp, Homo sapiens
  source 1..286: mol_type = other DNA
gcgcctctgtcattctactgcggccgccctggcttccttctacctgtgcggccctcaacgtctccttggtgcgggacccgcttcactttcggctcccggagtctccctccactgctcagacctctggacctgacaggagacgcctacttggctctgacgcggcgccccagcccggctgtgtccccggcgccccggaccaccctccctgccggctttgggtgcgttgtggggtcccgaggattcgcgagatttgttgaaagacattcaagattacgaagtttagatg

SEQ ID NO: 688 - DNA, 132 bp, Homo sapiens
  source 1..132: mol_type = other DNA
gggccttttctctgcacggagccggcgcttttgcagttgcttctgcggaaaggtggtagttaagaatttgtaaaggccagagaactacctacgattctctcagcggtctctcttctcctcaagtttgaaatg

SEQ ID NO: 689 - DNA, 137 bp, Homo sapiens
  source 1..137: mol_type = other DNA
cctcctccctccttccgtcctccgcgccttccgtcggtcggtccttgcttcctgcttcgcctccgcgcctcgcgctatgggacagagcccccgatccgccagcaccacctgaggatccagaaaccgccccagcgatg

SEQ ID NO: 690 - DNA, 133 bp, Homo sapiens
  source 1..133: mol_type = other DNA
ctgtcctttcagcaccacaagctcgggctgaggagggaggactcctggccgtcctcctcctcttcaaattggcttgaatcttctctgaccccccacgagtgcagcacagtctgggaagaaaggcgtaaggatg

SEQ ID NO: 691 - DNA, 218 bp, Homo sapiens
  source 1..218: mol_type = other DNA
gcgccccttccggcgcggggagggcgctgaagatcggggccgctcggccgcaggccgcctccagcgccgcgggatgtagcgcgggggaccgcggcccccagcagagcccgcctgcccggcttgtctaccatcagagggagatctctgccccctggggctgagagaccccaacctttccccaagctgaagctgcagggtattgaggtaccagccagatg

SEQ ID NO: 692 - DNA, 325 bp, Homo sapiens
  source 1..325: mol_type = other DNA
ttttcccttgggacccgggtccacacggcggggtcgcccgtccatctccggctcgcccgcggggcccatcgtcgacgttagcggccgttctccgagccgactgacccatccttggcgctgccgccgcgcgcttgttctcctccctcgccccgccttcatcctccccgttcacggaaacgacagctgcggctgcggggctggcgccgcctccctccacctaccacgtctgccctcgccgctctagccctgcgccccagcccggccgcggcacctccgcctcgccgccgctaggtcggccggctccgcccggctgccgcctaggatg

SEQ ID NO: 693 - DNA, 214 bp, Homo sapiens
  source 1..214: mol_type = other DNA
gtcccctcttcggcttccgtagaggaagtggcgcggaccttcatttggggtttcggttcccccccttccccttccccggggtctgggggtgacattgcaccgcgcccctcgtggggtcgcgttgccaccccacgcggactccccagctggcgcgcccctcccatttgcctgtcctggtcaggcccccaccccccttcccacctgaccagccatg

SEQ ID NO: 694 - DNA, 53 bp, Homo sapiens
  source 1..53: mol_type = other DNA
ctgcctttcccgggcgctgattcctgagtgctgagcgcgaacccgaggagatg

SEQ ID NO: 695 - DNA, 73 bp, Homo sapiens
  source 1..73: mol_type = other DNA
atctcctttagccccgcccgcctccgtagctgcctgaagtagtgcagggtcagcccgcaagttgcaggtcatg

SEQ ID NO: 696 - DNA, 28 bp, Homo sapiens
  source 1..28: mol_type = other DNA
tgatcttttccaaggctgtacagacatg

SEQ ID NO: 697 - DNA, 101 bp, Homo sapiens
  source 1..101: mol_type = other DNA
cgccctctcgccgcgtcgccggtgcctgcgcctcccgctccacctcgcttcttctctcccggccgaggcccgggggaccagagcgagaagcggggaccatg

SEQ ID NO: 698 - DNA, 164 bp, Homo sapiens
  source 1..164: mol_type = other DNA
gcttctctttcggagggagtgttcgccgccgccgcggccgccacctggagtttcttcagactccagatttccctgtcaaccacgaggagtccagagaggaaacgcggagcggagacaacagtacctgacgcctctttcagcccgggatcgccccagcagggatg

SEQ ID NO: 699 - DNA, 44 bp, Homo sapiens
  source 1..44: mol_type = other DNA
gtttcttttgcggctccacgtcggcaccagctgcggggcaagat

SEQ ID NO: 700 - DNA, 98 bp, Homo sapiens
  source 1..98: mol_type = other DNA
ggttctttctgtgtttgttctctgccctgccaaggccgtagagctggtgcgtgcgggtagcggggctctccgaggagccgcacgccggcggcaccatg

SEQ ID NO: 701 - DNA, 239 bp, Homo sapiens
  source 1..239: mol_type = other DNA
ctacctccttttccgcgggccccgcccaggcggctgcccgtgacctgcctgggcgcggggaactgaaagccggaaggggcaagacgggttcagttcgtcatggggctgtttggaaagacccaggagaagccgcccaaagaactgatatccaaagagaagaagaaaaagtgaaacgatctgtgaaagatgctgccaagaagggccagaaggatgtctgcatagttctggccaaggagatg

SEQ ID NO: 702 - DNA, 41 bp, Homo sapiens
  source 1..41: mol_type = other DNA
cgaccttttggccaggttagggagggggcgacgctgagatg

SEQ ID NO: 703 - DNA, 38 bp, Homo sapiens
  source 1..38: mol_type = other DNA
cgctctttccggcggtgctcgcaagcgaggcagccatg

SEQ ID NO: 704 - DNA, 83 bp, Homo sapiens
  source 1..83: mol_type = other DNA
ccttcctttccctccggcgtcctctcccggccctctcgcgctgcactgtctctccgacgcaagactgtcccggcccggatatg

SEQ ID NO: 705 - DNA, 44 bp, Homo sapiens
  source 1..44: mol_type = other DNA
cgccctccttgccgcccagccggtccaggcctctggcgaacatg

SEQ ID NO: 706 - DNA, 83 bp, Homo sapiens
  source 1..83: mol_type = other DNA
cgccccttcgcggcgcttcctagttcggctggttcttctgtcgccggcttcagcagcccgcgcccgggcaggaatagaagatg

SEQ ID NO: 707 - DNA, 118 bp, Homo sapiens
  source 1..118: mol_type = other DNA
cgttccttcgccgccgccaggggtagcggtgtagctgcgcagcgtcgcgcgcgctaccgcacccaggttcggcccgtaggcgtctggcagcccggcgccatcttcatcgagcgccatg

SEQ ID NO: 708 - DNA, 202 bp, Homo sapiens
  source 1..202: mol_type = other DNA
ccgcctctcggccccgcggcctggccggcaagcagggctgcagtcacggggcggcgcggagggccccagcccagtcaggggtgtggccgccgccaccgtaaggctaggccgcgagcttagtcctgggagccgcctccgtcgccgccgtcagagccgccctatcagattatcttaacaagaaaaccaactggaaaaaaaaatg

SEQ ID NO: 709 - DNA, 46 bp, Homo sapiens
  source 1..46: mol_type = other DNA
cgctcttttcattcacgaaggtagtgaggcctagtggaaagccatg

SEQ ID NO: 710 - DNA, 13 bp, Homo sapiens
  source 1..13: mol_type = other DNA
cctcccctcgatg

SEQ ID NO: 711 - DNA, 604 bp, Homo sapiens
  source 1..604: mol_type = other DNA
ccccctttccggcaggctactgggctccgcccacacacctcccggcctggttcctaaacgccagctcggagcaatccccttgggctggagccaaatccctgctgtgattttaaggaagaccggcaggtccgggcccccaagggtcaaccccacacacatccccgcactttcctgtatgcaggcctgcgagcgtagagggagtggaattcacagcctccccacccatccgcaggggtctcctgggaggaacccaccagcgataggaacactgaagctgggctacggcgtccgcccgagccttttcttaaaggcgccgaccccggaagcggggcgtccgagggagcgcgcgacgggccacgcacgtccgggcgtccagttcggggcagcttctccggctggtgggtgggtggggcagcctttcaggcagggtggcaaccaactatatctgaggaccagagccattttggggcaccagagcttgtgacctctccatctccacccagctgggtccaggggccactctcagcactcacctcagcagctgacatcataaagcagacttgggaacctggaagcactctggagaacctttccctgagacatg

SEQ ID NO: 712 - DNA, 67 bp, Homo sapiens
  source 1..67: mol_type = other DNA
cgccctttcagttctgcttgctgtcggcaccgctgcgttacccggaaccgccgggccgaacagcatg

SEQ ID NO: 713 - DNA, 99 bp, Homo sapiens
  source 1..99: mol_type = other DNA
ggttcttccttttttatttaccggtggctgtgcttccaatttaggaagaccccggcgacctgttcctcacccccgcttcgccctcacactttcgggatg

SEQ ID NO: 714 - DNA, 23 bp, Homo sapiens
  source 1..23: mol_type = other DNA
tcgcctcctccctccccaagatg

SEQ ID NO: 715 - DNA, 120 bp, Homo sapiens
  source 1..120: mol_type = other DNA
gttcctccttgctctcgcccctactctttctggtgttagatcgagctaccctctaaaagcagtttagagtggtaaaaaaaaaaaaaaacacaccaaacgctcgcagccacaaaagggatg

SEQ ID NO: 716 - DNA, 504 bp, Homo sapiens
  source 1..504: mol_type = other DNA
tagtctttccaggtgttagtcgaaacctcgtggtgcgaccctggtcgtcccaaaccccctaggccttaatcctggggcggtgggggcggggaggccgtgagcacggcttccgctcctccaatccgccagagggcgcagcggccggcctctcccttcccggggttcttcgcgccgggccccttccgcgtgggtgagtgaatgtgagagtcagcgctcgcgccgcgcgcgccgcccgcctccgctgttcggcgctctgctttaggcggtggggggcgggcgcgcgcgtaaaagcatagagacgggcattgagctcttgggctagagcgtcgccgagtcggagccggagcctgagccgcgcgctgtgtctccgctgcgtccgccgaggcccccgagtgtcagggacaaaagcctccgcctgctcccgcagccggggctcatctgccgccgccgccgcgctgaggagagttcgccgccgtcgccgcccgtgaggatctgagagccatg

SEQ ID NO: 717 - DNA, 86 bp, Homo sapiens
  source 1..86: mol_type = other DNA
agctctctagcagagcgccgttgctgggggaatgcagaagcggccgcgggctagcaagctcccggagccggcggcgcaccaccatg

SEQ ID NO: 718 - DNA, 333 bp, Homo sapiens
  source 1..333: mol_type = other DNA
cctccttttcttcctcagcgggtccgcggcccgctactctccgggaggggcgcttcccgacgccaaggtaggcctctcccgacgccggggcggcccttcctgatgccggggtgtgtctctcgcgacgcgggggtgggctccggacgccggggctggccttgccgaagtcgggggtgggtccctccggacgccgaagtgggctcgggatgcggggctgggaccctcccgattccggggcggattccggacgccgggaccggccattactggtgccgggttgggcttctccagatgccggggctgggtccttcccaaggttgagacaaaaggatg

SEQ ID NO: 719 - DNA, 63 bp, Homo sapiens
  source 1..63: mol_type = other DNA
ccgccccttcccatcgtgtacggtcccgcgtggctgcgcgcggcgctctgggagtacgacatg

SEQ ID NO: 720 - DNA, 28 bp, Homo sapiens
  source 1..28: mol_type = other DNA
cagcctcctttgcgggtaaacagacatg

SEQ ID NO: 721 - DNA, 53 bp, Homo sapiens
  source 1..53: mol_type = other DNA
cttcctctcaagcttggcgtttgtttggtggggttacacgcgggttcaacatg

SEQ ID NO: 722 - DNA, 203 bp, Homo sapiens
  source 1..203: mol_type = other DNA
taccctcttctgttgctttctccctgtggctcgcgccgtcccccgccgcccgtcgaccccgcttccatgtccctggcggacacagctcccaggaacctccacgcccatggccactaggcagagggaatcctctatcacctcctgctgttccacctcgagctgcgacgcagacgacgagggcgtgcgcggcacctgcgaagatg

SEQ ID NO: 723 - DNA, 306 bp, Homo sapiens
  source 1..306: mol_type = other DNA
cccccttcttttgtggtccggcccattgcgagggtgacaggaaaccctgtgcagggagcgccgccatcttggaccagcccgaggaagatactgagggagcacaggagcagtcaccgctgccactgctactgccgctactgctgccggcgcgtctgcacctctcggcctgccagtgtacctgccggcgcctcggtcgaccgcccccgccccctctcccgctgcgtccgcactcctgttcctggtcctgacgcccccctcccgcccggaaagctgcccagccaccagcaaccccccagtgccaccatg

SEQ ID NO: 724 - DNA, 145 bp, Homo sapiens
  source 1..145: mol_type = other DNA
cttccttttcctgtttggttttaagtaggctataaaaatcaagttgctgtcttcagagggtctgtggtcctctgatcaacataggctggtgggagtacaggactcgcctcctcagggttccctgtgctgccacttttcagccatg

SEQ ID NO: 725 - DNA, 513 bp, Homo sapiens
  source 1..513: mol_type = other DNA
ctctcttcccctctccctctccctctgccgggtggatgctttctccatgtggcaaggctgtaactgttcacagctgtctgaaacagcagtggaccaggagcagcttggagttttaactttcattttacaaagaacaacatgtttgaatgtttcagcaggcaagttataactggcatctacttcttgttcttctagaacaccgaaaatctctcccagcactttagaaaggggaccctgactgtgttaaagaagaagtgggagaacccagggctgggagcagagtctcacacagactctctacggaacagcagcactgagattaggcacagagcagaccatcctcctgctgaagtgacaagccacgctgcttctggagccaaagctgaccaagaagaacaaatccaccccagatctagactcaggtcacctcctgaagccctcgttcagggtcgatatccccacatcaaggacggtgaggatcttaaagaccactcaacagaaagtaaaaaaatg

SEQ ID NO: 726 - DNA, 27 bp, Homo sapiens
  source 1..27: mol_type = other DNA
gtttctcttgcgccctggtccaagatg

SEQ ID NO: 727 - DNA, 320 bp, Homo sapiens
  source 1..320: mol_type = other DNA
cacccccttccacgtcagccaaggactctggagccgccgccgccgctgctgcggttcatagccggagtagacggagccgcagtagacggatccgcggctgcaccaaaccactgcccctcggagcctggtagtgggccacaagcccccagtcccagaggcgtggtgggtcgggcagagtcggaagaactggctttctagctggaagatgcggaaggggagcgactaggccgcttgcgtctgggcctggcagaagggaccggattttctggcatccttaaatcttgtgtcaaggattggttataatataaccagaaaccatg

SEQ ID NO: 728 - DNA, 69 bp, Homo sapiens
  source 1..69: mol_type = other DNA
gggtcttttgcggctgcagcgggcttgtaggtgtccggctttgctggcccagcaagcctgataagcatg

SEQ ID NO: 729 - DNA, 109 bp, Homo sapiens
  source 1..109: mol_type = other DNA
ctttctttttctccaaaaggggaggaaattgaaactgagtggcccacgatgggaagaggggaagcccaggggtacaggaggcctctgggtgaaggcagaggctaacatg

SEQ ID NO: 730 - DNA, 182 bp, Homo sapiens
  source 1..182: mol_type = other DNA
gtgcctttccagtggacctgggctgttgttgcggttgttttccttctctccgtgcaacgctggcaagtctcaaagtcgccacagaaacatgcccctgattcagtgcctctgcttagctgtaacatgttaatcagaactacctggcatcttcctgaacaagactttcaataggggccagtatg

SEQ ID NO: 731 - DNA, 56 bp, Homo sapiens
  source 1..56: mol_type = other DNA
agatcttcttccgggcggacgtggagccggaagcggaggttccgggctccgggatg

SEQ ID NO: 732 - DNA, 77 bp, Homo sapiens
  source 1..77: mol_type = other DNA
cgtcctttagccgggagcctgtctttgcttgcctttgcctttgaggctctgtggctgtggggctgagtggcatcatg

SEQ ID NO: 733 - DNA, 85 bp, Homo sapiens
  source 1..85: mol_type = other DNA
agctctttccccgcgactgcgccacgtctgaggcggctgtggccgcgtcggtgtccgcgtcgaggagccggggcagggcacgatg

SEQ ID NO: 734 - DNA, 152 bp, Homo sapiens
  source 1..152: mol_type = other DNA
ttctctctttcggccggcgccgccagttcctggggcacacccagaggtccccttctcgccgccgcctgcaactgcgagggtagcccggggccgcttggagtcgcccggacctgagaggctgctgcactgggcctcagccagccctccggatg

SEQ ID NO: 735 - DNA, 359 bp, Homo sapiens
  source 1..359: mol_type = other DNA
cgtccttctaatcctagtcttcgtttggtccggttgcactcttcctatagcccagagggcgagagggcctgtggcctgggggaaggaggacgaggttctgcctggatcccagcagtaggacgctgtgccatttgggaacaaaggaatagtctgcctggaatccctgcagatcttggggccggaggccagtccaacccttggagcaggaagaaacgcaaagttgtcaagaaccaagtcgagctgcctcagagccggcccgcagtagctgcagactccgcccgcgacgtgtgcgcgcttctctgggccagagcgagcctgttttgtgctcgggttaagagatttgtcccagctataccatg

SEQ ID NO: 736 - DNA, 188 bp, Homo sapiens
  source 1..188: mol_type = other DNA
cggcctcccgcacgcaccgcgcagcctgctgtgcccgtgggtcccgagtgctccgccgcccgccccgacccgggcccagccgcctccacggcccgcgctcgtactggagcgaagagcggcctcctgaaggaggggaagggacgtgggggcggccacggcaggattaacctccatttcagctaatcatg

SEQ ID NO: 737 - DNA, 201 bp, Homo sapiens
  source 1..201: mol_type = other DNA
tctcccttttttccttcttccttcccctcctcgccgccaccgcccaggaccgccggccgggggacgagctcggagcagcagccagagtttattaaccacttaacctctcagaactgaacaaagacaacattgttcctggaacgccctctttttaaaaaagaaagcataacccctactgtagaactaaatgcactgtgcatg

SEQ ID NO: 738 - DNA, 505 bp, Homo sapiens
  source 1..505: mol_type = other DNA
cggccttttgtcagcgcgcagggccaggagagctctcatttcctcccagcctcgtgcgggaaatggctttaattctgacggcagggctgtgagggactagcgggaacccgagccttttgtcaaggaactgcggcgtcggtggccagtcatccccgccgccgcggagccgctgcactgctgggggatctcccagcagctctgacgagcgcgggctgcagcatgggcagaaaacgctgccctgcagattagctgggtggattttttaagcgcaccccaccccccaaacccataaaataacaaaaccaacccgcagtggccgaccggagatagctaagatgccgcgcaggagtttccacctggatgtttgaggttgtgtagatgtggccggcacccttgagagtggagctagggggtgcagactgagcagtgaacagaaggagccttggacagggctgggccagcctcccgagttccaggagcgaattgcaaacccaccgggaaaatg

SEQ ID NO: 739 - DNA, 112 bp, Homo sapiens
  source 1..112: mol_type = other DNA
ccgccttccggctccagtccccgggctcggcctcggcgaggtgtaattcgcagcgcgggccggccccggaggctctcggcgagcgcggcgcggtaacaagtgggcgaggatg

SEQ ID NO: 740 - DNA, 581 bp, Homo sapiens
  source 1..581: mol_type = other DNA
cgacctctacttccacctctggccccaagtacagcgccagctgcggcctcgggagcgcccgcgggggtgcccgtgcaccggccgcgcctcctccctggcgcgggactcggccgcagctgcctcggaccccggcacgatcgtgcacaacttttcccgaaccgagccccggactgaaccggctggcggcagccacagcgggtcgagctccaagttgcaggccctcttcgcccacccgctgtacaacgtcccggaggagccgcctctcctgggagccgaggactcgctcctggccagccaggaggcgctgcggtattaccggaggaaggtggcccgctggaacaggcctcagttcctgcttttgaaaggaagagggggagtctgtgacccctgaggcctccttgcaactctgttttccaagctttgcacatcttccgaatttcttcttcaaagtctaccctaatgaaatatcagacaattttccaagtgtgcttcatgaacttctgggaggtgcttcacagtttctgcaaatgattgattgaattttcactttgaaaaaatatactttaaggcgacacaagatg

SEQ ID NO: 741 - DNA, 45 bp, Homo sapiens
  source 1..45: mol_type = other DNA
ttttctttcctggtgtcccgtcgcggcttgggacccggcaagatg

SEQ ID NO: 742 - DNA, 96 bp, Homo sapiens
  source 1..96: mol_type = other DNA
tgctccctctcccacaaggcagcgcgccggctcggacgcggccggctaccgagccctttgtgagggctgtgagctgcgcctgacggtggcaccatg

SEQ ID NO: 743 - DNA, 24 bp, Homo sapiens
  source 1..24: mol_type = other DNA
gaatcttttccacagcccaaaatg

SEQ ID NO: 744 - DNA, 307 bp, Homo sapiens
  source 1..307: mol_type = other DNA
gtttcctttgttgtgagctgcggcagagactggtggctggaggagacgccggcgctggagagtgcgctgcgccgcccgccgctgagggaccgcggggttagccactgctggctgcttccagtgttcgccgagaggtaccgggggtgacagctccgggaccggccgaaaggcgaggaaccggtgtggaaattaaaagaacacacatattttgactggggctttgatcaaccaaatgctaaaaagccacataaagaagatccctaatagtcatttctcaacaattatatagtcaactgatgtaacaatg

SEQ ID NO: 745 - DNA, 18 bp, Homo sapiens
  source 1..18: mol_type = other DNA
ctccccctttccaccatg

SEQ ID NO: 746 - DNA, 308 bp, Homo sapiens
  source 1..308: mol_type = other DNA
gcttccctcttctctcgccgcctcctggcctccgcaccgacgcggcccgggctggagccgagccggggccgagctgcaggccggaccggagccggatctgtacccgctgagacgtggaaacatggaggcctgagccggtgtgcgccacctgggctgcggcggcgacagcgacttctcctgacccctctgccaccctcccatccgtccgcgggtccgtggagctggagcagatcccccagccggctgagacaggttgtcttttggaaatgcaggtttaaggacaaattatctgcttaagctagaagatg

SEQ ID NO: 747 - DNA, 144 bp, Homo sapiens
  source 1..144: mol_type = other DNA
cctcctctttctcctcctcctcagggctccagtcaggccgatccgctccgctcacggaaggaaaacagaaataacttgctggcttgtctggagtcacatgtacttaggtgacaatttacagaaagtcatctctgcagcttgatg

SEQ ID NO: 748 - DNA, 91 bp, Homo sapiens
  source 1..91: mol_type = other DNA
cgttcctttgtgctgcggcggcggcttctcgagtcctccccgacgcgtcctctaggccagcgagccccgcgctctccggtgacggaccatg

SEQ ID NO: 749 - DNA, 64 bp, Homo sapiens
  source 1..64: mol_type = other DNA
ctctcctttggcttggggctccggagttgccactgccgccggcgctggtaagcttttcaggatg

SEQ ID NO: 750 - DNA, 87 bp, Homo sapiens
  source 1..87: mol_type = other DNA
tgacctctttcgggtctctttgaatctccgctgtagcgtcacctggaaggcagatctaacagagaacctggactgtctcctatcatg

SEQ ID NO: 751 - DNA, 284 bp, Homo sapiens
  source 1..284: mol_type = other DNA
ccgccttctggacttggtcttagttcccagtcgcggccaaatcacgcctcagccacctcccgcaagcctctcactgcctcagccacgctttccaggctggtttctggtccccatccgcggctggtccggccctgggaccgaatcacttcccagcgagaggaaggtcaaatttctcgaccggctacgggaaggtcgcggccgccgccctgtcagccgcctcggcgcccccaggacccctcgggtctctttaaccggaagcggaagtgcgtgtcggcgggatcatg

SEQ ID NO: 752 - DNA, 17 bp, Homo sapiens
  source 1..17: mol_type = other DNA
cagtccttctcagcatg

SEQ ID NO: 753 - DNA, 297 bp, Homo sapiens
  source 1..297: mol_type = other DNA
cgttctttgttctgtccccggtgtgtgggtctgtgacagggtccaacagggcctggtccgtgtccggtcccccaaatctgtcgtccctgcccccaggcattggcatcaacaaaagtcagaattcccgggaacttgaacagaggctgctaaattcccagtaattgctcctttggccttctagggactgacttcaaagaaggaaggaaagaatcaggcagtgcttcctcattctcttttaaaacccgcttcccgctgagtctgcacccaggagaccagagagcaccttgcccttccatg

SEQ ID NO: 754 - DNA, 250 bp, Homo sapiens
  source 1..250: mol_type = other DNA
ggttcttctcctaggcggaagccagaccagagagcgtgcgtgtttttcccagggtgccccgcgctgctgttatggccgcctccttgaggtagtatccgcacatggaattctagggccgcaggtgtatttacggtaactgtcgccactagatttcagcgcctttggactctcctgttttcactttcttttgttgactcccgtgtggccctcgtgggagcctgttttggctgcagcggtgtctggggtgatg

SEQ ID NO: 755 - DNA, 33 bp, Homo sapiens
  source 1..33: mol_type = other DNA
gtttctctttcctctcagtttgcgcacaccatg

SEQ ID NO: 756 - DNA, 81 bp, Homo sapiens
  source 1..81: mol_type = other DNA
tgctcttctcgttcccgagatcagcggcggcggtgaccgcgagtgggtcggcaccgtctccggctccgggtgcgaacaatg

SEQ ID NO: 757 - DNA, 57 bp, Homo sapiens
  source 1..57: mol_type = other DNA
cctcctcctggacggcggcagcggcggcgcgaggagccggcgggcagcggcgcgatg

SEQ ID NO: 758 - DNA, 149 bp, Homo sapiens
  source 1..149: mol_type = other DNA
gcgccttctccttgcttctgggggtcgtggccttgctcccgctgtgcgggaaaagaatccaggcccttccacgcgcgtgtgggtgcgggggccccgaagtgctcgtggttccccgctaggtctccgctggggcaggaaccggaatcatg

SEQ ID NO: 759 - DNA, 244 bp, Homo sapiens
  source 1..244: mol_type = other DNA
cctccttcgtcgcggcctctagtgcactttcggctccttccccttcccgggcctttcagcttggtctttccgggcctcgcttcccccagcccctgcgcccggcccgaacgagaggttccggagccccggcgcgggcgggttctggggtgtagacgctgctggccagcccgccccagccgaggttctcggcaccgccttgagagcttcagctgccccaggattagaatcccaagaaaatcaaatg

SEQ ID NO: 760 - DNA, 66 bp, Homo sapiens
  source 1..66: mol_type = other DNA
ccgcctctttcccgccgccgcctgggaggggacccgggctgccaggcgcccagctgtgcccagatg

SEQ ID NO: 761 - DNA, 162 bp, Homo sapiens
  source 1..162: mol_type = other DNA
cttcctttccagcctcccgccctcgtctgcttccggccctgtggcctggtggggctctgcaggctccctcgggagtggtccttgggccgtggcccctctgggaggcctgagggagctcaatcctggtagcaacacccctgaattcctggtggtgaaaggatg

SEQ ID NO: 762 - DNA, 277 bp, Homo sapiens
  source 1..277: mol_type = other DNA
agttcctttatccctgggcccaacctccccgccgacccgcggtccaggcctcggtctctctcttcggcggcgagccgcggcccagaccccggcagaggacacttgtcggcacgttctcacccctgtcatctcagccccctgcctagctccaccccaggcttgggaacccggcccctgacggcccattgtccgcgggcccagcccccgcgctgaacgcacgctcgcccttgcccctaaccagcgcgtctaccccggcaacgcgcagtgacctgggatg

SEQ ID NO: 763 - DNA, 252 bp, Homo sapiens
  source 1..252: mol_type = other DNA
gtttcttttctgcgcttgtgcgttttctgttcggtttccttcccgctagcggggccacgagggttgctaggcaacagcccctgggtgacttggtcttagggtcctgtccggcttggggctgatgaaaggagctgtccgcgcccgggctcttccgagaagtggttgctgacagccacaaagtgaaagggagtgaggcggcgtggacgagtaaggagtgacagtgaggattcacatttgggttatttcaagatg

SEQ ID NO: 764 - DNA, 96 bp, Homo sapiens
  source 1..96: mol_type = other DNA
cgtccttcctggtcctgcgggtccaggactgtccgcggggttgagggaaggggccgtgcccggtgccagcccaggtgctcgcggcctggctccatg

SEQ ID NO: 765 - DNA, 205 bp, Homo sapiens
  source 1..205: mol_type = other DNA
ctccctctggggcgcgggcctcagttccgggctacagcagccgacgccgagaggcaccgtttcttcttaaaagagaaacgctgcgcgcgcgaggtgggcccctgtcttccagcagctccgggcctgctcgctaggcccgggaggcgcaggcgcaggcgcagtgggggtgagggcgcgtgggggcgcacagcctctggtgcacatg

SEQ ID NO: 766 - DNA, 28 bp, Homo sapiens
  source 1..28: mol_type = other DNA
tggccctttcctttccgcgtgtagaatg

SEQ ID NO: 767 - DNA, 371 bp, Homo sapiens
  source 1..371: mol_type = other DNA
tctccccttctacagagttcctccggcgcttcctccaccccgggatacacagaacctcatctcctacggtgctgaagcctgcagcagggcaggatgggcaggagagcagagccgcggagtctgcggcgcgggtgaagagcggcgcgtaattcccgcagcaagattgttccgcgcccgcagcccctggactagcaggatccgaaccccggcggctgcgtgcttataggcgcagacgtcagagagcccgcggcttaaagcgcgtcgcctggctagcgccaccccctagccttcttcaaggcctccagggctgggcccaagcgcccgtcgacggcaccctgggcccagaggactcgcgggcctcatctccaatg

SEQ ID NO: 768 - DNA, 512 bp, Homo sapiens
  source 1..512: mol_type = other DNA
agttctttctgatagcaggcagccatcttgcctggagcctgagaaagggaggagagacagaaggaaccggcgacagtggtctcagggccgctccggggggcctcaagaaccggaggcagccccggaggtggtccccgatcccgggctatgctcttggatctgagaagggaaggcggagggcggcggggacaagatgggtggagaatgtcaagcaaggaatgctaggcgggggaggggcgttgctatggcgactggggaggggcggtgtctgttctgaatcgctgtgtgtcacccgggcgctgcccaggaagggcagggctggggtgatgaccatggtaacacccgggggggagttcgtgacatctccggcgcggagggactcgatgtctatggcaatggtcgcctggtggaagggacggaactagatcccttcgctcgggacgctcacattccaggcccttgtcctgcaggctgccgcgggcggacacgccagaggaggaggccggggaatg

SEQ ID NO: 769 - DNA, 71 bp, Homo sapiens
  source 1..71: mol_type = other DNA
ccgccttttacgacgcgccggaaagcaacggcaagggcggcagccagcaccgggcggagagggctaccatg

SEQ ID NO: 770 - DNA, 126 bp, Homo sapiens
  source 1..126: mol_type = other DNA
ctgcctccttctactcgggcgccccggcggccgccacctctccccagcccaggagaggctgcggagccgcagccgcccagaccgcgcagcgcgggaggcaggttccgcacgaaataaatcagaatg

SEQ ID NO: 771 - DNA, 126 bp, Homo sapiens
  source 1..126: mol_type = other DNA
ttccccttttggggacagatcccgaagttcgagcatccctcggataggccgggtgtcaggcctggtctctcaggcccgtccaggcccatcttgacgattccaagaccacccccttgagcaagaatg

SEQ ID NO: 772 - DNA, 124 bp, Homo sapiens
  source 1..124: mol_type = other DNA
ccgccctttgccactccccctgcctcctctccgcctttaacttctcgggaagatgaggcagtttggcatctgtggccgagttgctgttgccgggtgatagttggagcggagacttagcataatg

SEQ ID NO: 773 - DNA, 363 bp, Homo sapiens
  source 1..363: mol_type = other DNA
agtcctctcgcagctgcgccaggacagccggcgcgcggccgtgcccacaagttgccggcagctgagcgccgcgcctcctcctgctcgcagccccctacgcccacccggcggcggtggccagcgccaggacgcacatcccgcggacaccgaccccagatgtaaagcgggaccccagcccctcgccccccggcgcgatcgacagtctcgccagcgtctcctctgccaaaacccagggctggaagatgtggcagccggccacggagcgcctgcaggagagatttgcagacacagaagcggcacagagaaggccattgtgaagatcaaggcagaaaccggagttatggcatcataagccaaggaatg

SEQ ID NO: 774 - DNA, 167 bp, Homo sapiens
  source 1..167: mol_type = other DNA
tttcctcctcctcctcctccgcctccgccgccgttgcttgaatggtggagccgaagctcggctcgtgaacacacactgacagctatagggcaggcggcggcaccgtccccgcttcccctcggcggcggggtgtcccgtcggcggccctgaagtgacccataaacatg

SEQ ID NO: 775 - DNA, 130 bp, Homo sapiens
  source 1..130: mol_type = other DNA
tggccttttttgggcgtctccctgctccgcggcccgggctggcgggcgggcgctcggctggcggctgcagcagcagagggagacccgcggcaaccccggcaacccagggctcggcgtcgctgccaccatg

SEQ ID NO: 776 - DNA, 656 bp, Homo sapiens
  source 1..656: mol_type = other DNA
aggtcttttagtctttttccccctcccttactcttcgtccccggtccctcccctccccacccctttccttctagctccgacgtttgcggccgcgggggcggcggaggatatggagtaaagccagagtcagtggccaggcacgaaggcagagcaggaacagccaggaggcgtttattaggggggcggggggaaagagccccagcaccgcccctcctggaagaaggaagaggtaagtgaccggccgccggcaccgaccgacctccctcaccggcggctctctcgcctgggctcccggagccggcgaggagggaatggaggactcgcgcccgggttaggcctcccagggccgctcaggctggtgggtgttgcctggtgacgggcctgccggcggccggccgggcgatcggcggtcggcgcccgcgcaaagcggggctggacgagcagcgagctccggggagcggatccgagagggccgagtcctcgaaagaggccttgaggcgacgggagacccgggatcgaagtcagctgccggagggagagccccccatgccggctcgagagctcgggtttcggtggtggagaacgtagtacctttcggggacattggacactactctaggaccgggtaactataactacccaatattgcagccatg

SEQ ID NO: 777 - DNA, 215 bp, Homo sapiens
  source 1..215: mol_type = other DNA
caccctctctcctagtacttcctgttctcggctaaccctggcgctgggccgggggctggagagtgaccgtggtctgagtgacctggggcggctgcgtgggccggggtgggcctcaaagccgggcaccagacgggaggggcggcgctcgggccgcgcgctgcccgcgccgggtcctggcgggcggcgaggctggggctgactcctgcctcaggatg

SEQ ID NO: 778 - DNA, 32 bp, Homo sapiens
  source 1..32: mol_type = other DNA
cgacctctggctaacctacccccggagccatg

SEQ ID NO: 779 - DNA, 34 bp, Homo sapiens
  source 1..34: mol_type = other DNA
cggccccttccggttacgaaaccttagcaagatg

SEQ ID NO: 780 - DNA, 166 bp, Homo sapiens
  source 1..166: mol_type = other DNA
tctccttttgcgcgacacggtctcagctgttccgcctgaggcgagtgacgctggccgccaacgaggtatacgtactgggaccctcgccctcagtctcgtctccggcgcggctacctgccccgttttccctgtgagttgacctgctccgggccgcgggccgccaatg

SEQ ID NO: 781 - DNA, 42 bp, Homo sapiens
  source 1..42: mol_type = other DNA
cggtctcctgtacgccctagactaggggccgccatctccatg

SEQ ID NO: 782 - DNA, 133 bp, Homo sapiens
  source 1..133: mol_type = other DNA
ttgtcctcttcgctgctccgtagtgacggggattgttgtgttgcagaaatccggcaatcgacctgaggacttgcgagccgctcagctcccgggacgtttggagctgctgctaaataatttctgctcagccatg

SEQ ID NO: 783 - DNA, 33 bp, Homo sapiens
  source 1..33: mol_type = other DNA
ggctctttctcctccacgtggggacgcaggatg

SEQ ID NO: 784 - DNA, 74 bp, Homo sapiens
  source 1..74: mol_type = other DNA
cgctctctctcactggcacagcgaggttttgctcagcccttgtctcgggaccgcagcctccgccgagcgccatg

SEQ ID NO: 785 - DNA, 181 bp, Homo sapiens
  source 1..181: mol_type = other DNA
cgctcccccccacgtgtccgccggagtttctccaccagcaacatggccgccgcctgagaggagagccgggccgccgccgtctctgcagcccgcgggtaactgggccgttgccgccgtccgcgctcggcccccgcggagagatcgagctgaaggactgcgcggctggctctcctctagtatg

SEQ ID NO: 786 - DNA, 217 bp, Homo sapiens
  source 1..217: mol_type = other DNA
gagcctttgcccgccagcgccttcgctctttggctccctgagttagtccggttgcttgcgatcgccgcggccggggctgcgaaccgaagggctcgctccgcgccgcctgggtctctacctcatccgtaggtgtggccctgatggtgtggcaggctctggactcctaaagctctggagcgaatttaagattttattcatgtgcatggcatagaagatg

SEQ ID NO: 787 - DNA, 270 bp, Homo sapiens
  source 1..270: mol_type = other DNA
ccgtctttctggaaacaccgctttgatctcggcggtgcgggacaggtacctcccggctgctgcgggtgccctggatccagtcggctgcaccaggcgagcgagacccttccctggtggaggctcagagttccggcagggtgcatccggcctgtgtgtggcgcgaggcagggaagccggtacccgggtcctggccccagcgctgacgttttctctcccctttcttctctcttcgcggttgcggcgtcgcagacgctagtgtgagcccccatg

SEQ ID NO: 788 - DNA, 104 bp, Homo sapiens
  source 1..104: mol_type = other DNA
ccttccttccccggggtagaagtccagggtgagaaattggttccgaactcaaaggaacccagtgccgggccacagccgggtcacgtggccggcggccccccatg

SEQ ID NO: 789 - DNA, 173 bp, Homo sapiens
  source 1..173: mol_type = other DNA
attccttctctgcatcgaaggatcaggaagtttgtgctctctgcgtggctaagtttttcacctactaggacgggggtggggtggggagaacaggtgtccttctaaaatacagcacaagctacagcctgcgtccagccataacccaggagtaacatcagaaacaggtgagaatg

SEQ ID NO: 790 - DNA, 240 bp, Homo sapiens
  source 1..240: mol_type = other DNA
cgctcctcctcttcgctgccggtgggcaccgccgctcgctcgcacttctgcgcccattggagcttcggagatccctgcggtcccgcgggacggcgcggcagcagctgacctcgcagacaggatcttgctctcttgcccagactggaatacagtggtgtgaacacggctcactgcagcctcaacctcctggactcagagatgtcggcttatttataggaattgcttgaagccagagtcatg

SEQ ID NO: 791 - DNA, 205 bp, Homo sapiens
  source 1..205: mol_type = other DNA
cgtccctttaagagcggctggccaggcacggcctccgcctctcagtacgcggagcgccggcggtcacctggggctcgcggagcggccagatcgcggcggagtcggcgcgcttccccgagggaaggtgggagaggggacccggacgcgaggtgccccgaagccctctcgagcgtaaccgtcccgcgcctctctgaggcggaggatg

SEQ ID NO: 792 - DNA, 903 bp, Homo sapiens
  source 1..903: mol_type = other DNA
ctgtctcttggctcaggcttggaggcctccgagcagcaacatcgtcccaattataccccgttggagcatcttcagatcttccactcttttcacaacgcaatcaaaatcttcgtacccattttgcagtagtgatctctgtaagttgctttacaattcataaagtttattctatttgatcttcactctaatttacaaagaaaagcagggaagtctatttctgttttacagaggtgtacagggaggctcacaggggctaagttcacacagtaagccctcgaagctgccagggctgcaaagcccaccctctttccaccgcaccgaactacctcctttcgcctacaaaacgtaggtggggaccactggtgttggaatgacggcccacctcgagtttcaggtgacttccactctgcaattaacttgcaggcagccccagacctgcaatgaacacacgggtgggggagagatatgcacgccagggtcagtgggaaccaacagccgaggggtgagcggggctaggggccccgggccgccggcggggcaaacgcggttcagaaacgcaggccgcgctctggcccgccccctgcagcagcacggcctgctcgccatcgcccggagagcgccgcgggttcccgagtccgggcgcggagggcgcgcgggcacggcggcaggggcgtgctcggaggacgcgcgctgcgctgctcctccaaagggcagctccgggggaaagagggtggcgtcccggggaagcccgcagccgccgccgatgtcgctgggactcggaagtgccgaaagaggggtgttgggaactcgcggcgcgcgtgaacgttgccgtcgccgccgcccgggacagcccggagaaactctcagcgtaggcatcgggaaccttcgtgccaaggagccatg

SEQ ID NO: 793 - DNA, 633 bp, Homo sapiens
  source 1..633: mol_type = other DNA
cctcctttttctcccaaaccacttcttcccccctaccccccgccacgcgaggctgcggcgcacggtatgggtgtgtttgtgtgtatttgtgtggggagggcgtttggagggaaggttaccgggagctccgaggccgctggggaacagggatcccggtgacaaagatggggatatttcctctgtcttccacttggaaacctcaacccccgcttcaggctccctagatactttctggggcccaaccgaaggccgtagccatccaaagcgttcccagcctttctggggagtgaaacttacccccggggttcgtcctagaggagcgtgagcggggaatgcccaggtcaaccgggctgtccgaattccgccccggctcagcctccggcctcagtccgggagagagatctgcctgtcggtctgggctgggggaaacgcggcagtggcctgggccacaggtgagggcagagtaaccagtgggaaggctgcgttttcacgaaggactcgggtgaagctgcagagctgcctttgagccctgactccttggcttcctgggtcggaggagatcttgtaatggagtggttcttcgtctcactagcaagatgcctgatttcctcaggatcaagggattgaagaatg

SEQ ID NO: 794 - DNA, 414 bp, Homo sapiens
  source 1..414: mol_type = other DNA
agtccttcgccgcattggggcaaaataatcccttcatttttgtgaaggtaccgtggaaaatatttcatttttcttctcaccggagcaattgtaaatgctatgcggtaagaggagttacctgtggaaaggtggttaagagattaggtaaagaaaaggaaaggacaccaaaataaagtgctgcggaagaatttttgtccagctgtgagacgacgagtgcgtgaagtgaaggcgattgagaggggctgagggaattgtcctctgtggaagggactttcttttggccctaggccccttcctgcccctgtcgtcagcagagtctctacaaggaagataacggactgtaaaattctataaagcaaagctacacatcacttgacaccatacaccatcttggttacataatgaagagagatg

SEQ ID NO: 795 - DNA, 71 bp, Homo sapiens
  source 1..71: mol_type = other DNA
atgtctcttgacagcggcggcggcgcagccggttccgggttcggcgcggggcggggatgtgaatcccgatg

SEQ ID NO: 796 - DNA, 99 bp, Homo sapiens
  source 1..99: mol_type = other DNA
ccatctcttcccttaggtgtttaagttccgcgcgcaggccaggctgcaacctgacggccagatccctcgctgtcctagtcgctgctccttggagtcatg

SEQ ID NO: 797 - DNA, 52 bp, Homo sapiens
  source 1..52: mol_type = other DNA
cttccttccaagaaccttcgagatctgcggtctggggtctggttgaaagatg

SEQ ID NO: 798 - DNA, 78 bp, Homo sapiens
  source 1..78: mol_type = other DNA
gcaccccttccgcgcagccccctgacctgcagcctccggacctcgctgcagcgcggacccggcccgcccgcccgaatg

SEQ ID NO: 799 - DNA, 161 bp, Homo sapiens
  source 1..161: mol_type = other DNA
ccgcctcttccgctctacagcggaggtggctgtggcggtggcgctggtggctgcggcggcggcggcggcagcggcgctcgagcggttcctgtcagggtcagccggcgggccccctgggtggtccacctgcaaatcgcggagcggcgccccagggatcgatg

SEQ ID NO: 800 - DNA, 38 bp, Homo sapiens
  source 1..38: mol_type = other DNA
gcgtctcttgtttgtgcggctgaccagttggcgacatg

SEQ ID NO: 801 - DNA, 721 bp, Homo sapiens
  source 1..721: mol_type = other DNA
cgttcttttctttgtatttccgcctctcgcctctctctaaaagccgcagttagaggcgagatttaggaaaaacctctgccgagtgagcctctggttgggaatatgtatgagaaaaaaaaactggcaaggcgttagtcaagcaaagctgaaggcagaggaaatttgatatctggctggagtctagaggatttaatgcaaataagatactctgagggcagcgtggcaaaaaaagactacaattcccggtggtcacagcgtttgagaagcgatgctttctgagacttgtagtaactaggagctgtgtttgaactatccaggctcaggacagcctcttgaaaaaaaattttttattaataaagcggatttgagtgggatctttttcctaatcgattacgggcccacacgtatgggaagaattctaacaatgattaaagggacatgctacctttacgactatccttttctaatcgatgactcctaaatctaggagtaggtagtcgatgtttgtggtctgggcgtctgtagaagggcaacctcgtgctttctgcagaggagaccggagggcagaaggcagagtccaggcttagactgcagttcctcgcttacctgtgcagtctaattttgagctgcctctttgtagtcttaaaaggcaggagcttcgtgttgtgggtctgctaacccgtacgtttccgtgggcaagtcgtgtgtactcctcgccatg

SEQ ID NO: 802 - DNA, 77 bp, Homo sapiens
  source 1..77: mol_type = other DNA
cgacctcttcaagatggcgggcgccggagactagcttccgcttccggtgtgagcggcccggccgggggggcaagatg

SEQ ID NO: 803 - DNA, 72 bp, Homo sapiens
  source 1..72: mol_type = other DNA
ttttctttatggcgtgggagaggccacagcccggactccatcgactcccccggctcttagactaaaatcatg

SEQ ID NO: 804 - DNA, 131 bp, Homo sapiens
  source 1..131: mol_type = other DNA
ctccctctttcttcccctctggggaagctcagtgctggacttccgaagaccttttacgacattgagtctcggagttggtctcagcgccggatccacttttcggcaaagtgacgtggacgtcaacagcaatg

SEQ ID NO: 805 - DNA, 800 bp, Homo sapiens
  source 1..800: mol_type = other DNA
gctcctctctggggagtggagggtgttcagttattaatgaccgctgagcaggcagcaccatgtcagtgtgacaactgatcgggtgaacgatgcaccactaaccaccatggaaacaaggaaaaataaagccagctcacaggatctctcttcactggattgagagcctcagcctgccgactgagaaaaagagttccaggaaaaagaaggaatcccggctgcagcctcctgccttcctttatattttaaaatagagagataagattgcgtgcatgtgtgcatatctatagtatatattttgtacactttgttacacagacacacaaatgcacctatttataccgggcaagaacacaaccatgtgattatctcaaccaaggaactgaggaatccagcacgcaaggacatcggaggtgggctagcactgaaactgcttttcaagcatcatgctgctattcctgcaaatactgaagaagcatgggatttaaatattttacttctaaataaatgaattactcaatctcctatgaccatctatacatactccaccttcaaaaagtacatcaatattatatcattaaggaaatagtaaccttctcttctccaatatgcatgacatttttggacaatgcaattgtggcactggcacttatttcagtgaagaaaaactttgtggttctatggcattcatcatttgacaaatgcaagcatcttccttatcaatcagctcctattgaacttactagcactgactgtggaatccttaagggcccattacatttctgaagaagaaagctaagatg

SEQ ID NO: 806 - DNA, 162 bp, Homo sapiens
  source 1..162: mol_type = other DNA
ggccctctctccgcgcggagccgagccggaactgcggcagtctctccctgccaggctcttcatccaaggtttctgtggatcccttctgaagttctatctgaaaattgcgcttaagtgaattttctgttagaagaacttggttgctactttcttgtcaagatg

SEQ ID NO: 807 - DNA, 116 bp, Homo sapiens
  source 1..116: mol_type = other DNA
ccgcccctttaacctttagggtgcgcgggtgcagtatatctcgcgctctctcccctttccccctcccctttccccaccccgggcgctcaggttggtctggaccggaagcgaagatg

SEQ ID NO: 808 - DNA, 29 bp, Homo sapiens
  source 1..29: mol_type = other DNA
cttcctctagaacccgacccaccaccatg

SEQ ID NO: 809 - DNA, 104 bp, Homo sapiens
  source 1..104: mol_type = other DNA
gctcctcttttccagtcctccactgccggggctgggcccggccgcgggaaggaccgaaggggatacagcgtgtccctgcggcggctgcaagaggactaagcatg

SEQ ID NO: 810 - DNA, 383 bp, Homo sapiens
  source 1..383: mol_type = other DNA
cctcctccttcctcctcctcctcctccttcttctcctccttctcggccgggaggaggcagggctggatccctcagccgccgccgctcctcctcctggcaggccggccgcggagtcagctgacgccggcgctccagcctcgcctccccgcgccgcgctctgcgctccccgaaagtggctgcaagccggccgcccactgtcagggttggggggacagagaaagtgatgtgcgccttctaaagcctcgcccagcgccgccgaagcagcttcacctctccaactttctcccaccgactgcttgtcttgaccctgccctccaccctccccagagccacttcgggtgcgcgctcttgggtaaagggggggtcaccggctgtctgggatg

SEQ ID NO: 811 - DNA, 175 bp, Homo sapiens
  source 1..175: mol_type = other DNA
tctcctccatcgcctgcagtaagggcggccgcggcgagcctttgaggggaacgacttgtcggagccctaaccaggggtatctctgagcctggtgggatccccggagcgtcacatcactttccgatcacttcaaagtggttaaaaactaatatttatatgacagaagaaaaagatg

SEQ ID NO: 812 - DNA, 367 bp, Homo sapiens
  source 1..367: mol_type = other DNA
tggccttttgccctagggagcgagtgcggagcgagtgggagcgagacggccctgagtggaagtgtctggctccccgtagaggcccttctgtacgccccgccgcccatgagctcgttctcacgcgaacagcgccgtcgttaggctggctctgtagcctcggcttaccccgggacaggcccacgcctcgccagggagggggcagcccgtcgaggcgcctccctagtcagcgtcggcgtcgcgctgcgaccctggaagcgggagccgccgcgagcgagaggaggagctccagtggcggcggcggcggcggcagcggcagcgggcagcagctccagcagcgccagcaggcgggatcgaggccgtcaacatg

SEQ ID NO: 813 - DNA, 25 bp, Homo sapiens
  source 1..25: mol_type = other DNA
cgctcttcctcaggcggcggccatg

SEQ ID NO: 814 - DNA, 91 bp, Homo sapiens
  source 1..91: mol_type = other DNA
cggtcttcctcctcgtcctgccgcagggccagaacccctgacggtattcagctgcgcgtaagtctggccggtgccatctgtctccgcaatg

SEQ ID NO: 815 - DNA, 73 bp, Homo sapiens
  source 1..73: mol_type = other DNA
cggtctccttcggcaaccccggccgaacggccacccagaggctgtgctgagctggcgcagcggcagcagcatg

SEQ ID NO: 816 - DNA, 170 bp, Homo sapiens
  source 1..170: mol_type = other DNA
gtttctttcctacgcagccgctcctgccgccgtggtcgctggagctttgcctctctaggccggcagcgcctctcctccatggtcctgtctgtcagcgctgttttgggagcccgccggtgaggccgggccacgctcagacacttcgatcgtcgagtctgtcactgggcatg

SEQ ID NO: 817 - DNA, 71 bp, Homo sapiens
  source 1..71: mol_type = other DNA
gattctttttggatagggttgacgttcgtggatagactcatatctgtgaccagtgtccgccaccgcggatg

SEQ ID NO: 818 - DNA, 54 bp, Homo sapiens
  source 1..54: mol_type = other DNA
ccccctccctgcccacctcctgcagcctcctgcgccccgccgagctggcggatg

SEQ ID NO: 819 - DNA, 96 bp, Homo sapiens
  source 1..96: mol_type = other DNA
cgtcctcccaagatggcggagacagagtgaagaaactgtgttccccccttgggttgctatcgatcaagggtaaaattccattctgatatcaaaatg

SEQ ID NO: 820 - DNA, 342 bp, Homo sapiens
  source 1..342: mol_type = other DNA
gcttctttttctggtagaaggcggggttctcctcgtacgctgcggagtctctgcggggtgtagaccggaatcctgctgacgggcagagtggatcagggagggagggtcgagacacggtggctgcaggtctgagacaaggctgctccgaggtagtagctctcttgcctggaggtggccattcattcctggagtgctgctgaggagcgagggcccatctggggtctctggaagtcggtgcccaggcctgaaggatagccccccttgcgcttccctgggctgcggccggccttctcagaacgaagggcgtccttccaccccgcggcgcaggtgaccgctgccatg

SEQ ID NO: 821 - DNA, 134 bp, Homo sapiens
  source 1..134: mol_type = other DNA
aggcctctccaagcccctaccgcacaggctcatagccccaagcccggaggaggtggctacattgtgtctattgtatcccttggctggtgtatttgtacatctctcgggacgtgaaattgacagtgaaaagtatg

SEQ ID NO: 822 - DNA, 245 bp, Homo sapiens
  source 1..245: mol_type = other DNA
cttcctctggcggcgtccggccgcttctcctctgctcctcgaagaaggccagggcggcgctgccgcaagttttgacattttcgcagcggagacgcgcgcgggcactctcgggccgacggctgcggcggcggccgaccctccagagccccttagtcgcgccccggccctcccgctgcccggagtccggcggccacgaggcccagccgcgtcctcccgcgcttgctcgcccggcggccgcagccatg

SEQ ID NO: 823 - DNA, 362 bp, Homo sapiens
  source 1..362: mol_type = other DNA
cgtccttctcgcgcctcgctctggccctgcaggttgtgtttccgcctctaccccgcctccattccgttgctctctcagtctcagacccgggctctcggtccgccgcttcaggtcttggcgcagcctcagagagttggcgcggctctgtgttgaccaaacctagtggatgcagttagcgccggagcccggccccgcccgtcaccagggttattcccgccttctaggtttgccaggactgccggccctgcagctgccttctgccccaggtttttggctactgatgttacaaacaataaaatattggagcatagagttgaagaacagactcaaaccaggtttttatttaattagttaaaaatatg

SEQ ID NO: 824 - DNA, 298 bp, Homo sapiens
  source 1..298: mol_type = other DNA
tttccttttccctccccctggagctgtagcggcagcagcagcaggaagccgagccgggttgagcgactcggaggcgagcggaggagctggaatatggggagtcagcgaggacggtggggccaggagcccttgggagggcctacggagggagcggccccaggcgctttctagagcgtgagcggtgggggagcaggcgcagggtggcacgagcggaggcggggcccgggcgtggggcacggctggggaagctgccgcctccggccctgcccggctgcctccgccgcggccagtggctatg

SEQ ID NO: 825 - DNA, 357 bp, Homo sapiens
  source 1..357: mol_type = other DNA
gttcctttttgggttagctttggcagtattgagttttacttcctcctctttttagtggaagacagaccataatcccagtgtgagtgaaattgattgtttcatttattaccgttttggctgggggttagttccgacaccttcacagttgaagagcaggcagaaggagttgtgaagacaggacaatcttcttggggatgctggtcctggaagccagcgggcctcgctctgtctttggcctcattgaccccaggttctctggttaaaactgaaagcctactactggcctggtgcccatcaatccattgatccttgaggctgtgcccctggggcacccacctggcagggcctaccaccatg

SEQ ID NO: 826 - DNA, 118 bp, Homo sapiens
  source 1..118: mol_type = other DNA
gcttctcttccgctccgggtcggctccgtttccctttccgggcgggcaggcggcggaccccagtgtctttatccctcttttgcacagtcagcttctgcagctctcccgggctagcatg

SEQ ID NO: 827 - DNA, 62 bp, Homo sapiens
  source 1..62: mol_type = other DNA
cgacctcttggctccgctagtgcccggcgcgccgccgccagtgctgcgggctccgggcaatg

SEQ ID NO: 828 - DNA, 879 bp, Homo sapiens
  source 1..879: mol_type = other DNA
ctttctctcaggaaactccactcccaactgacaggtgctatttccagccagtcctatgctgttgcaaatagtgagtccatgaatgccctctgccgtgtgcattacttattttcatcagcagatcttcgtaacacactcctggaagtgggatgacggggtcaaaaggcgaatccatacataagttaaatagatattgctcaattctcttccacggggttcagaccattttggatttctacgagcaatgaagacagtgctattcctctacaccctggccggccaactgagcgtggttaaacgtggggagggaggagggtgaggttaccaacctgatggttgagaaagggcctccgcccagcgcgcccttcctccacccccacccgagagacagctgaactccggccgggacgcgcgtgttgccagtccagccctgcaccgcgtcccctgagggcgggctgcaggcggccgggaagccttgcacaaccggcccaaaagaggaagcccagaaagtgctgaagtaaacactttgggagaccgttgcaacataaagcggcctctcagtctttggtggaaccatcactaggccccaatcccttagtccctcttgcgtcgaggctgcaaaatggttccattcgccaggagacgctcctgagagaagggcgcgcgcggcacaggggccttccttgcacctcggagcaaagcagctcggatagcgccacacgtctgcgcgctgcgtgggaagggcagggctgacagcacttcctccccggggcagcgacctggagcccgggtgcggcagtctgcaccgcgcgtcgctttcccggccggagtctcgccgccttcccgcgccccgcagcgccccgcagagcagtcgagatg

SEQ ID NO: 829 - DNA, 77 bp, Homo sapiens
  source 1..77: mol_type = other DNA
ccttccctcttcactgtgagctcagagcagcaggacaaagtgctcgggacaaggacatagggctgagagtagccatg

SEQ ID NO: 830 - DNA, 77 bp, Homo sapiens
  source 1..77: mol_type = other DNA
acctcctttccctttcggattcccgacgctgtggttgctgtaaggggtcctccctgcgccacacggccgtcgccatg

SEQ ID NO: 831 - DNA, 76 bp, Homo sapiens
  source 1..76: mol_type = other DNA
ttttcttttattcttgtctgttctgcctcactcccgagctctactgactcccaacagagcgcccaagaagaaaatg

SEQ ID NO: 832 - DNA, 46 bp, Homo sapiens
  source 1..46: mol_type = other DNA
cctcctctactatctcggtatcaccaaacccttgccggctcttatg

SEQ ID NO: 833 - DNA, 350 bp, Homo sapiens
  source 1..350: mol_type = other DNA
ctgcctcttatgaagcaatactagagaggaaaaacaaaacccattcctttaagaaagattccgcctcctctcataagcaagcgcctaatggtaattgtagagtttactaagtcaaacacttactactcagcattgagagaagctgctgctgctaatgctgctgctgctgctgccgccgccgccgctgctgctgctgctgttggtctgaggctgcagtaggtttctgtgcagcattgcagaatccacacctagagaacagaagacacagacacgtacgtctactacccttgttagaaggaagctttggatcttcggtggataacaagagtaatccacagacttaaaacatg

SEQ ID NO: 834 - DNA, 199 bp, Homo sapiens
  source 1..199: mol_type = other DNA
agcccttttggatctaatgcgcagaggaggttggcccagagctcccgggctcccccaaggctgaactccgtccaaggtgcccgcaggctccctgcccgccttccccatgccagcccgcagctaggggcaggggcagcggcggctggggttgggggtgggtggggagcttttggggaggacaggtcgcagcttggctatg

SEQ ID NO: 835 - DNA, 279 bp, Homo sapiens
  source 1..279: mol_type = other DNA
ttatctttttgcctagcgactgacaacaggctggttgcttggcgtggaatcctaaagtggcctggctttgagactggagtgagaccccagccctaggctggggttctttccattatagaggagacggattcagaagggctacagaccaaggttgttgaaaaccagacatatgatgagcgtctagagattaacgactccgaagaggttgcaagtatttatactccaaccccaagacaccaaggacttcctcgttctgcccatcttcctaacaaggctatg

SEQ ID NO: 836 - DNA, 1573 bp, Homo sapiens
  source 1..1573: mol_type = other DNA
cccccttttcgggaggagggaggcagggacttgcaggcaagagttgcacctggtctaggaacctgcagagaaaagaactctggggtaagtagtgttctggcactggcacggaaaggggtaaagggtggggggcatgagagggacgaaatggagagggcagggaatgaattatgcaaaaaaatctccaatatttcgcagcggagggagagcacagcacagcactcccaggatgagtcctgcctgggtctcccgcgccgaacccgcagcacgaagttctttttaagaagagaaactcgaaaatcctggagggtaacagaggcagccagggcggggcggagtgcggaggcggctgccagggactggggccgaggcggcggccaaggtggcctgaagctgtgacacccagcctcctcctcctcctcctcatggccgcgctcagcctcacctccccgcccgggcctcctgcctccgcccccgggtgccgggctgcggagctgacgctgggacgcccggcggcggcgaggacgctcacctggccaagcctccttctcctcctccccctcccgcccccacctgtcctcctcctctctgagttgggaagcgtagggatccgtaggcgaggaaataacgacccctgcagttgtattgcggaaaatctcgacagcggcgctagttgcgggcgatggaagccaggcaactgggggttctggggagttcaggaaaatagcagaggagcaggaagggcgcgcgcgacctggagagtctgtgtgcccccaccgcgccccagtccccggggcccagcccttcccctcggcgccctggacgcactgccggaacccggctgagaggctgcaggctgcgcgcggacctggggagcagggagggtcggcggaggctgccggcggctggcggtttcgggcaataatccctgcctctctttctctgtgtgtctgctgtgtctgctccttccccgccccccggaagcaggagaagaactgccccggagcgcagcagccaccctccgaccatgccccggtgaggggggcggacttcgagggcaacttgccgcggactgcctgggcttagccagcgagctacgcgctcccgggagcccggaattgcacggcgcagcccggcggggggctatcgtctatgtcttcttggggcgccagacgaatcggggtctcgtttttgctggaagagcccagtgttggtggcttcaggtggctgctgccgccgccgccgccgccgccgctgctagtgcggtttccgccgctggtgcgaagagaagagacacgcgagcggggagacctccaaggcagcgaggcatcggacatgtgtcagcacatctggggcgcacatccgtcgagcccgaggggagatttgccggaacaattcaaactgcgatattgatcttgggggtgactgtccctggccggctgtcgggtgggagtgcgagtgtgcactcgctcggaagtgtgtgcgagtgtgtatgtgtgtgtgccgtgtcgggctccccccttccccccgttttcccgtcgagtgatgcacttggaatgagaatcagaggatg

SEQ ID NO: 837 - DNA, 76 bp, Homo sapiens
  source 1..76: mol_type = other DNA
cctcctccctgtaacatgccatagtgcgcctgcgaccacacggccggggcgctagcgttcgccttcagccaccatg

SEQ ID NO: 838 - DNA, 38 bp, Homo sapiens
  source 1..38: mol_type = other DNA
gttccttctactctggcaccactctccaggctgccatg

SEQ ID NO: 839 - DNA, 36 bp, Homo sapiens
  source 1..36: mol_type = other DNA
ccgtcttcccttcccgcgttccccgggagaaacatg

SEQ ID NO: 840 - DNA, 35 bp, Homo sapiens
  source 1..35: mol_type = other DNA
cctcctttccgcttccggtgtcccctacagtcatg

SEQ ID NO: 841 - DNA, 76 bp, Homo sapiens
  source 1..76: mol_type = other DNA
gctcctcctgctggctggggattttccagcctgggcgctgacgccgcggacctccctgcgaccgtcgcggaccatg

SEQ ID NO: 842 - DNA, 130 bp, Homo sapiens
  source 1..130: mol_type = other DNA
cctcctctcgcgagaggcgcaaggcgtggagtcgacggctggagagaagccgggagcgagcccaggcggcagtcttgattcccttttggccagcagtttttaggtctgtcagtactgcactgcaagaatg

SEQ ID NO: 843 - DNA, 113 bp, Homo sapiens
  source 1..113: mol_type = other DNA
taccctccttccccattttctgtggtccaactaccctcggcgatcccaggcttggcggggcaccgcctggcctctcccgttcctttaggctgccgccgctgcctgccgccatg

SEQ ID NO: 844 - DNA, 174 bp, Homo sapiens
  source 1..174: mol_type = other DNA
agccctcccttccgcgcgcttactttgtttataacttgaaaaatcctctccgtctcccttccctgcctcctttcctttccctttcctctgccagtacaactagacccggcgtctggcgtccccggtgcccagcattctgcggggcaggcggattaattggaattcttcaaaatg

SEQ ID NO: 845 - DNA, 185 bp, Homo sapiens
  source 1..185: mol_type = other DNA
cctccttccggctgggcaaggggccgcggggagcagctcgggactgaaccgagaggtgccgaaggaaccggcgggccgcttgatcccgctgcagacgtaggagatgcctgggacaaggaggccaccttctcagggcaaaagaaaaagaaggtgacaggcgttgagaccaccgaagggaacccatg

SEQ ID NO: 846 - DNA, 125 bp, Homo sapiens
  source 1..125: mol_type = other DNA
agttctctctgggaacatctggtgggtactacaggccctattccaggccctatggcctgtggaacctcaccacgggggggagggctgggccagacggagacatcacctgtggtgtcagccccatg

SEQ ID NO: 847 - DNA, 82 bp, Homo sapiens
  source 1..82: mol_type = other DNA
cctccttcgcgccggcccttccgcgggtgatcagctggtctgcgctcccctgacgtgggctggggcacgtcaccgccgaatg

SEQ ID NO: 848 - DNA, 153 bp, Homo sapiens
  source 1..153: mol_type = other DNA
gggtctcttccggagtcttttcctggacggggtccctgcggtgggtgtgtttcggcctggcctgggcaggcgcttgtgctgccagggcgccgggcccggggaggccggggtctcgggtggccgccggcccaggcgctggacggcagcaggatg

SEQ ID NO: 849 - DNA, 16 bp, Homo sapiens
  source 1..16: mol_type = other DNA
ttttctttccaaaatg

SEQ ID NO: 850 - DNA, 54 bp, Homo sapiens
  source 1..54: mol_type = other DNA
ggttcttcactcgcgactgacggagctgcggtggcgtctccacacgcaaccatg

SEQ ID NO: 851 - DNA, 289 bp, Homo sapiens
  source 1..289: mol_type = other DNA
ccttcttcctcttgttcctcctcctgcctctcttcgcttcgcctgcaaacgcggtgggggctgctcggcggtcaggagcaggttaccctccgtctgcatgcccaccatcaaggtatgaggatggtagaagctctcgtcgaaccagatggatgaagaccactaacggcttttgtttcctctggtaacagcaagagacagagcgacatgagagattggaccgcgggctgcactggagaatttactggtaggataattcatccctaaagagattgaagtgagcttcagaatg

SEQ ID NO: 852 - DNA, 151 bp, Homo sapiens
  source 1..151: mol_type = other DNA
cggcctccgcccctgcagccgcgggcacgcggaggggctcctggctgcccgcacctgcacccgcgcgtcggcggcgccgaagccccgctccccgcctgcgcgtctgtctcgtccgcatctccgcggcctcctgctccacgacgtgaccatg

SEQ ID NO: 853 - DNA, 113 bp, Homo sapiens
  source 1..113: mol_type = other DNA
ttttcttctcgggctgcaaacaaagggaagcctgcaacaagttaagctgaagaccgaagcaagagctggttcaggtggcagccacagcagcctcagggacctcagcaactatg

SEQ ID NO: 854 - DNA, 198 bp, Homo sapiens
  source 1..198: mol_type = other DNA
ctgtctctttaaggtgcccgaggctcgcgggcgctgcgctgaggggacggcgggaggcgcggcctggcctcgcactcaaagccgccgcagcgcgccccgggctcggccgacccggcggggatctaggggtgggcgacttcgcgggaccgtggcgcatgtttcctgggagttactgatcatcttctttgaagaaacatg

SEQ ID NO: 855 - DNA, 313 bp, Homo sapiens
  source 1..313: mol_type = other DNA
gtcccctttgtgaggcccgggatgggaggtgcccggttcccccagggacagcttcaagcggtagggacagacatctgaggacccagcctcagggatgctgtccccgggcttccaggctccagcgccgtaggactgaggcagactccacggtgagaaagagacccgatctaacccaggcctttcatcagagcccaggagggaaggcaggaagtgggaccacgaggcccggggggcttctaactcgtctggccagggagatctgaattggggtgaagagcagaatctccagaacaaggaggaggtggtgatcatg

SEQ ID NO: 856 - DNA, 115 bp, Homo sapiens
  source 1..115: mol_type = other DNA
gctcctcctgtcttgtctcagcggctgccaacagatcatgagccatcagctcctctggggccagctataggacaacagaactctcaccaaaggaccagacacagtgggcaccatg

SEQ ID NO: 857 - DNA, 81 bp, Homo sapiens; identical to SEQ ID NO: 756
  source 1..81: mol_type = other DNA

SEQ ID NO: 858 - DNA, 24 bp, Homo sapiens
  source 1..24: mol_type = other DNA
ctgtctttacccagagctaccatg

SEQ ID NO: 859 - DNA, 648 bp, Homo sapiens
  source 1..648: mol_type = other DNA
ctctctttttcttgcagaaccgtctctctcccttctctgtctcttagcacagagctcttattcagccactagcttggcccttcctgcttcaattgtaatgcttgttctgcccgtccacagactattggcggcagaaacaacgaatttcctccaaactaggcggtgttggtggctcttgcattcctctggatgaggaaatctagttggggggttccagaaggggaaggctcctgggctttcaatacatcctcctgaatcatacctcgtttcgggttccctagaaaaatctggacgtgtaaaaagaactcttaacggccgatgcagctcttccaaagctaaggctgccttggagttttcataagaaattgtccctggaggtgttggatgatcacagcttccttggagcattgcagttgctggaatccagtttcaggattaagggagggctgcctccttgcaatgggctgccaagaaaacggctgtgcttgttcttaacctcaggctctgtctgtgatcagtctgagagtctctcccaggtctactgctccctggaaagccctatctctctgcaggctcgcctctgggctttgtctccttggagccacatcactgggacagctgtggatgtggatgcagatttgaaccatg

SEQ ID NO: 860 - DNA, 144 bp, Homo sapiens
  source 1..144: mol_type = other DNA
ccgcctcctcgctgcgggaagggtcctgggccccgggcggcggtcgccaggtctcagggccgggggtacccgagtctcgtttcctctcagtccatccacccttcatggggccagagccctctctccagaatctgagcagcaatg

SEQ ID NO: 861 - DNA, 49 bp, Homo sapiens
  source 1..49: mol_type = other DNA
ctgtctccatcttgtctgtatccgctgctcttgtgacgttgtggagatg

SEQ ID NO: 862 - DNA, 87 bp, Homo sapiens
  source 1..87: mol_type = other DNA
cctcccctttttttccgccttctgccagcagaagcagcagccgcagcacctgagccgctactgccgctcactcaggacaacgctatg

SEQ ID NO: 863 - DNA, 161 bp, Homo sapiens
  source 1..161: mol_type = other DNA
ggacctccctctttgcctcctccctgttccaggagctggtgccctgggctctgcgctgttgttttcagcgctccgaaagccggcgcttgagatccaggcaagtgaatccagccaggcagttttcccttcagcacctcggacagaacacgcagtaaaaaatg

SEQ ID NO: 864 - DNA, 187 bp, Homo sapiens
  source 1..187: mol_type = other DNA
cttccttctggagctgggtcctgactagggaccgcctgggtgaggtgaggacctggtggccgcagttgtggcactgtgcgcaggcgctgaactgaccggacggagcgggcggctgtggcctcgccagctggtttaaaaatatccttttttgctgaaggaacacatttgctggtatagtttcagaatg

SEQ ID NO: 865 - DNA, 388 bp, Homo sapiens
  source 1..388: mol_type = other DNA
ctatcctttcctctcagtcctgccatctagctgccttgggtctcgcgctccgcagagcgttccgacactctccggcctcgttctgccgcctccgcgcgctctccccgtgcggccaccgcgccccccaagcttgcctccttcttgccggacttggggccgcgcgccctgactccttcccctcccgcggacccgcgcactcccggcgcggcctctcccccacgcaggccaccgtgcactctgtggcctccccctccttccccgctctcctcgcgcttctctggctccctagctgtcgcgctctcctcggcgagcgcgctcccggcccgcgcgctccgggctccggtttctcccggctcctgtcagtgcggtgactgcgctgggaaacatg

SEQ ID NO: 866 - DNA, 488 bp, Homo sapiens
  source 1..488: mol_type = other DNA
ccttctcctgagagtcggagccacagccagagccctgcccaggccgagccggagctgcagcccgagcgcggtggtgccctcagccccgtcctcttgtcctcctcagcctcggtgccttggaatttgtgtcgctgagtcagcaagcctttcagatttgcccggtttttgttgtttgtggtttgtatcaagatgggaactcaaacaagtcattcctcctaaggagctggtgtcttcatccagaagggacagtttgtgccagctctccagagagaaaaggatctggtactgttctggagtggcctgtagcagacactgaaccaccagccagctgcatttgttgtcctggaagtcattgccaactctgccagtcacactggggtccccagagaagtcaagatctgccggaggcgctgggcaatgaccccgggactccaggccagaggggtctgaagctgtttgggaaagcagcgggactccttgggaagatg

SEQ ID NO: 867 - DNA, 191 bp, Homo sapiens
  source 1..191: mol_type = other DNA
ctgcctttttcaccacctctaatttcagcttcagcagttgcttggaactttggttctggcagcagcagcaacatcattaccgctagcggcagttttgtgccgaggcacctacacacctcccgtcctctctgccagatcgcgggcctgtcggtgtctgctcctacacgccaacgccggtgggcaggaccatg

SEQ ID NO: 868 - DNA, 61 bp, Homo sapiens
  source 1..61: mol_type = other DNA
cgccctttcaccccggacgtgggcgggagaggaagcggctggtgatgctggaacaaacatg

SEQ ID NO: 869 - DNA, 99 bp, Homo sapiens
  source 1..99: mol_type = other DNA
cgctctttctccgacagctgccgggggtgccctgcaagctgttccgcgcgtcctgcccgtctgtccccgcgggtcgtcgcccgccacagccgcgccatg

SEQ ID NO: 870 - DNA, 90 bp, Homo sapiens
  source 1..90: mol_type = other DNA
cgctcttttgtttcttgctgcagcaacgcgagtgggagcaccaggatctcgggctcggaacgagactgcacggattgttttaagaaaatg

SEQ ID NO: 871 - DNA, 168 bp, Homo sapiens
  source 1..168: mol_type = other DNA
agacccttttcagacccttttccggctgacttctgagaaggttgcgcagcagctgtgcccggcagtctagaggcgcagaagaggaagccatcgcctggccccggctctctggaccttgtctcgctcgggagcggaaacagcggcagccagagaactgttttaatcatg

SEQ ID NO: 872 - DNA, 92 bp, Homo sapiens
  source 1..92: mol_type = other DNA
gggtcctttttcctctcttcagcgtggggcgcccacaatttgcgcgctctctttctgctgctccccagctctcggatacagccgacaccatg

SEQ ID NO: 873 - DNA, 79 bp, Homo sapiens
  source 1..79: mol_type = other DNA
ggctctctccttgtcagtcggcgccgcgtgcgggctggtggctctgtggcagcggcggcggcaggactccggcactatg

SEQ ID NO: 874 - DNA, 102 bp, Homo sapiens
  source 1..102: mol_type = other DNA
ggctctttccgctatctgccgcttgtccaccggaagcgagttgcgacacggcaggttcccgcccggaagaagcgaccaaagcgcctgaggaccggcaacatg

SEQ ID NO: 875 - DNA, 256 bp, Homo sapiens
  source 1..256: mol_type = other DNA
gatccctttcccagtcctgcttcccagtgcctcgggccagggaatcctggcctccgcctgcggagccggcggaacccgcttcccgcctccacggggcagcgccagcggcctggtcctttcaccggcagctccgtgccgacgctctcaccgctcttcctatcgccgggagtggcgggccgaccagggggcggccgggctaccgtccgccattcccgtgtctctgcgcccgcgggggccgcccgagccggccaccatg

SEQ ID NO: 876 - DNA, 193 bp, Homo sapiens
  source 1..193: mol_type = other DNA
ccgccttttccagttccaggtgtgcagaagtgtcctctccccacgcgcggcgggctgcacttggtcgctggctccgagatcgcgcggggccgccggaagcccaagacggtaccgggggccgcagccgcagccggcgccgccctccgccctccccaacagcaggccgagtcccgtagcatccggtagggaaatg

SEQ ID NO: 877 - DNA, 389 bp, Homo sapiens
  source 1..389: mol_type = other DNA
agctctttccgggggcccggggaactactctccttgcctcgctctgtctccttcgaagtgctctgcgcgaggttcagagcggccgccgcctccaaagggacggttttctagagctccgacgcctctcggtgcccctctgctccggcccttgccctttgacctcgctctcgcggcagggtgagaggtcgggtggccatcttgtggcggcggcgcgggcggctgttactgcggagacccatcccctcccccttctcgcacccctggcagtctgtcagtcggtaaaaagtcccgcagcctgtcaggtgaggccccggcctcgtgccgtcgctcttcccgccgcactgggcggcccaggccgctccctgccgggcctcactgccgccaccatg

SEQ ID NO: 878 - DNA, 274 bp, Homo sapiens
  source 1..274: mol_type = other DNA
ctatctttctagacaaggcagttgaggaggagggagcgcttgagggggactggcctggcgtgcactccgcacctcggggacattattgcgcgtggaacggctgcttttggaaggcacaacttcctgaatggaccatgactcccaccaaagatccctgtctctgattcaccaaacagcttcaaccctgaaaccaggacgagaagttgacaacatctgagtggacagctaattgacctaagacttcagaccagactattgcccagaagaaaagatg

SEQ ID NO: 879 - DNA, 513 bp, Homo sapiens
  source 1..513: mol_type = other DNA
gggccttttatctcggtgctgccgggggaggcgggaggaggagacaccaggggtggccctgagcgccggcgacacctttcctggactataaattgagcacctgggatgggtagggggccaacgcagtcaccgccgtccgcagtcacagtccagccactgaccgcagcagcgcccttgcgtagcagccgcttgcagcgagaacactgaattgccaacgagcaggagagtctcaaggcgcaagaggaggccagggctcgacccacagagcaccctcagccatcgcgagtttccgggcgccaaagccaggagaagccgcccatcccgcagggccggtctgccagcgagacgagagttggcgagggcggaggagtgccgggaatcccgccacaccggctatagccaggcccccagcgcgggccttggagagcgcgtgaaggcgggcatccccttgacccggccgaccatccccgtgcccctgcgtccctgcgctccaacgtccgcgcggccaccatg

SEQ ID NO: 880 - DNA, 137 bp, Homo sapiens
  source 1..137: mol_type = other DNA
ctctccctttgtcattctagctgcctgctgcctccgcagcgtccccccagctctccctgtgctaactgcctgcaccttggacagagcgggtgcgcaaatcagaaggattagttgggacctgccttggcgaccccatg

SEQ ID NO: 881 - DNA, 60 bp, Homo sapiens
  source 1..60: mol_type = other DNA
cttcctcttttctaagcttgtctcttaaaacccactggacgttggcacagtgctgggatg

SEQ ID NO: 882 - DNA, 501 bp, Homo sapiens
  source 1..501: mol_type = other DNA
ctttctctttttgtttggcttctaacgcgttgggactgagtcgccgccgtgagctccccgaagactgcacaaactaccgcgggctcctccgccccgtctgcgattcggaagccggcctgggggtcgcgtcgggagccctggcgctgcagctccgcaccttagcagcccgggtactcatccagatccacgccggggacacacacacagagtaactaaaagtgcggcgattctgcacatcgccgactgctttggggtaacaaaaagacccgagttgcctgccgaccgaggacccccgggagccgggctcggagcagacgaggtatccggcggcgcccatttgggggcttctaactctttctccacgcagcccctcttctgtcccctcccctctcgctcccttttaaaatcagtggcaccgaggcgcctgcagccgcactcgccagcgactcatctctccagcgggtttttttttgtttgtcgtgtgcgatcctcacactcatg

SEQ ID NO: 883 - DNA, 424 bp, Homo sapiens
  source 1..424: mol_type = other DNA
cgtcctctccgggggcggagcgggtcggcgggcctgacagggaacctccctgaccgagcccacgtctccccacggccagagaaatctccggcccggcccgcatcgccagcccccaggcccggaggaacggcccgagcccaggagaaccacatcttcgtcccagccccggaggctcctgtgggcaagatcgtgagccaacgggttcctgaggcccctcctggccaggcagggtttccccgcgcgtttccgaggagccctgcctggccgggcggctggacaaacaggtcgtagcaccgatcgcgcccgcccccagcaggggtcccgcacaggcttgcccctgacccccacccaaacctgtccttccgctttgcccccaaacagtgcacttgccggcggtcccaacccagcaggagaagtggacatg

SEQ ID NO: 884 - DNA, 22 bp, Homo sapiens
  source 1..22: mol_type = other DNA
ggctctccccgcgtccaagatg

SEQ ID NO: 885 - DNA, 153 bp, Homo sapiens
  source 1..153: mol_type = other DNA
gcgccttcctcttcccatcgcgcgggtcctagccaccggtgtctccttctacatccgcctctgcgccggctgccacccgcgctccctccgccgccgccgccttgctgctgctcaaagctgctgccgccccttgggctaaaaggttttcaaatg

SEQ ID NO: 886 - DNA, 304 bp, Homo sapiens
  source 1..304: mol_type = other DNA
ctttctctttccctttgcaattgccttgggtcctgccgcacagagcggcctgtctttatcagaggtccctctgccagggggagggccccagagaaaaccagaaagagggtgagagactgaggaagataaagcgtcccagggcctcctacaccagcgcctgagcaggaagcgggaggggccatgactacgaggccctgggaggtcactttagggagggctgtcctaaaaccagaagcttggagcagaaagtgaaaccctggtgctccagacaaagatcttagtcgggactagccggccaaggatg

SEQ ID NO: 887 - DNA, 251 bp, Homo sapiens
  source 1..251: mol_type = other DNA
gctcctcctcctcccctccgtcggtcagtcagtccgcgaggagagtccgcggtggcggcgacggtggcgagagccgcgggggccgtaggaagccaaccttccctgcttctccggggccctcgccccctcctccccacaaaatcagggatggaggcgcctccccggcaccctcttagcagccctccccaggaaaagtgtcccccctgagctcctaacgctccccaacagctacccctgccccccacgccatg

SEQ ID NO: 888 - DNA, 71 bp, Homo sapiens
  source 1..71: mol_type = other DNA
cctccttctcctcccagtgccacagagccgaagcccgagctgccgccgcagccacagccgagggcactatg

SEQ ID NO: 889 - DNA, 20 bp, Homo sapiens
  source 1..20: mol_type = other DNA
tgaccttttaccccaacatg

SEQ ID NO: 890 - DNA, 22 bp, Homo sapiens
  source 1..22: mol_type = other DNA
ccgccttccccggcgcgccatg

SEQ ID NO: 891 - DNA, 256 bp, Homo sapiens
  source 1..256: mol_type = other DNA
agttctttgtagtgcctccctcagactctaacacactcagcctggccccctcctcctattgcaaccccctcccccgctcctcccggccaggccagctcagtcttcccagcccccattccacgtggaccagccagggcgggggtagggaaagaggacaggaagagggggagccagttctgggaggcggggggaaggaggttggtggcgactccctcgctcgccctcactgccggcggtcccaactccaggcaccatg

SEQ ID NO: 892 - DNA, 148 bp, Homo sapiens
  source 1..148: mol_type = other DNA
cctcctcccgttccagctgccgctgccgcttcctgggctgagtccgcccgcggtcccggcggcgccaggtgcgttcactctgcccggctccagccagcgtccgccgccgccgtagctgccccaggctccccgccccgctgccgagatg

SEQ ID NO: 893 - DNA, 429 bp, Homo sapiens
  source 1..429: mol_type = other DNA
cctcctttttgcacacacacgaatacaaagagccatacgaccttcggatgccggaaggtccttctgaatcccttccctgttccttaggttgcactagtcgggggttccatgctggggggcagaaggaatgctctctaccgtctgaaaccgttcatcaggaaggccttgatttgtgatgtgctaggagagcacaggatctgcaaatagaaggcacctgtctcccttctgcaggccgaggagaggccgccatggactgtgtgcttcttcatggcttgtttactcttctttcacagaccctacagcttggggcctgggctcctctgaccatcctcattgagaaaggaaagtgagtccagagaagttgatgcttcctacctgttggagcggcccagcagtgtaagcgtggttgttactgccccatccgccatg

SEQ ID NO: 894 - DNA, 174 bp, Homo sapiens
  source 1..174: mol_type = other DNA
cgccctcttccgaatgtcctgcggccccagcctctcctcacgctcgcgcagtctccgccgcagtctcagctgcagctgcaggactgagccgtgcacccggaggagacccccggaggaggcgacaaacttcgcagtgccgcgacccaaccccagccctgggtagcctgcagcatg

SEQ ID NO: 895 - DNA, 151 bp, Homo sapiens
  source 1..151: mol_type = other DNA
cggcctctcttcctcagtgcgggcggagaagcgaaagcggatcgtcctcggctgccgccgccttctccgggactcgcgcgcccctccccgcgcgcccacccacccagtccggctggactgcggcagccgcgcggctcaccccggcaggatg

SEQ ID NO: 896 - DNA, 83 bp, Homo sapiens
  source 1..83: mol_type = other DNA
ccgcctctggcgaatggctcgtctgtagtgcacgccgcgggcccagctgcgaccccggccccgcccccgggaccccggccatg

SEQ ID NO: 897 - DNA, 28 bp, Homo sapiens
  source 1..28: mol_type = other DNA
cctcccttttcttttctgccgggtaatg

SEQ ID NO: 898 - DNA, 288 bp, Homo sapiens
  source 1..288: mol_type = other DNA
cttcctcttttctgtctggcccgcggccccgctgcctgccctgctccaggctccacctgcgccgccgatcgcccgggtatcgcgggggcccaggccagctgagtccgttttccgcgccggggtggcgcccctccaaccgtcctaacgccgggccggcagcaaggagtgttcctgggacctcagagaccaggctcagagcctgacatccctgcgaggggacagcctcatccgcccaggccagtgggggtctctacaagtgcccaggctcaggtgcagcccccagcaatg

SEQ ID NO: 899 - DNA, 46 bp, Homo sapiens
  source 1..46: mol_type = other DNA
ggtcctcctgggagtctcggaggggaccggctgtgcagacgccatg

SEQ ID NO: 900 - DNA, 153 bp, Homo sapiens
  source 1..153: mol_type = other DNA
tcctctctatgcttggggaaggaacttcctgtaagcaaggcttgaggcttgctctcgccttcgtcagcagccctcctcaatcttctccaaactcccgtccccaggccacacagattctcctcaagagagccctataaggacattggtaaaatg

SEQ ID NO: 901 - DNA, 381 bp, Homo sapiens
  source 1..381: mol_type = other DNA
attcccttccgcccccttctctaagctgcacagcctgaatagaagggctggtccagcggcggcggaggctggcgctgtcctgagagggagggctctgtgcggaagagtcagggcgacccttgggcgctggagtacgcttgggactggggctgcgagtgagcaccagcgattggttcggaagcggacatttggttcagaacgagcatttaactctgccagggatccgctgggctctgacgactgcggtagatccatggcttcctggacgttcacccgtagagtcatcctagcttaactcttgttccctggtctcagttcacaagcctcacctgtatcttcctggctcggaagataattgaaaccaagtctgacttctcaatg

SEQ ID NO: 902 - DNA, 35 bp, Homo sapiens
  source 1..35: mol_type = other DNA
ctttctcttcccgacgcgtgagttaggccgtaatg

SEQ ID NO: 903 - DNA, 292 bp, Homo sapiens
  source 1..292: mol_type = other DNA
ggccctctggcaagatggctgctgcggaggcgttggagcgcggaaatctggaaccgggatggcgacgtctacactgagtcggaggcgaaggagcttactccacgggaacagcctctagataatctgagttgttgaaaatacgaagcctgttactcgtgaacagtggctgacaacagtgttgttgtgagcctggctgtctgcttggacccagaggtttcgtctgccagggtttttggttgtatttaggatttcagggaaaagtgtccaagctttcagtgttggagcaggtatg

SEQ ID NO: 904 - DNA, 123 bp, Homo sapiens
  source 1..123: mol_type = other DNA
cggcctcttcgcttttgtggcggcgcccgcgctcgcaggccactctctgctgtcgcccgtcccgcgcgctcctccgacccgctccgctccgctccgctcggccccgcgccgcccgtcaacatg

SEQ ID NO: 905 - DNA, 108 bp, Homo sapiens
  source 1..108: mol_type = other DNA
tcctctcttgactttgagcgtccggcggtcgcagagccaggaggcggaggcgcgcgggccagcctgggccccagcccacaccttcaccagggcccaggagccaccatg

SEQ ID NO: 906 - DNA, 29 bp, Homo sapiens
  source 1..29: mol_type = other DNA
ggttcctctcggagcggagacggcaaatg

SEQ ID NO: 907 - DNA, 156 bp, Homo sapiens
  source 1..156: mol_type = other DNA
ccccctctcgcgggaattatttgaacgttcgagcggtaaatactccctggggctgtcatagaagactactcggagagcgctgcctctgggttggcgggctggcaggctgtagccgagcgcgggcaggactcgtcccggcagggttccagagccatg

SEQ ID NO: 908 - DNA, 33 bp, Homo sapiens
  source 1..33: mol_type = other DNA
tatcccctcccacggtctctagttcgcgttatg

SEQ ID NO: 909 - DNA, 275 bp, Homo sapiens
  source 1..275: mol_type = other DNA
ctgcctctacagctgtgtgtaggcctgggggcgagggtcttcggaacgtagcgctggctgcggccccgcccgcctacccacccgcccgtccggcagccggctcccgccgcctccgcgctctgtctggggccagccacctggcgggccgctccggtgcgcctgcccgcgcttttcactgacaggcgctgttccccacagccagcgccgcccgccacgtcccagctctcggccaacggagctgcgcggcgggtgacctttccgagcccagcgcgatg

SEQ ID NO: 910 - DNA, 243 bp, Homo sapiens
  source 1..243: mol_type = other DNA
ctaccctttcatctctgcaactccttcctccctgggcctcccttctggtgtgtctgtgggtctgtctaggtgggcttgggaaaggggaaggaaggggcgtctctttaggcagctcagactggacaagccttctttgaaaatggtcctttgaacacacgcctgctggtggttggtcagacagatgcgccagcgggagccccggggccccaaggggacagctatctctgcaggaccagtgcgatg

SEQ ID NO: 911 - DNA, 402 bp, Homo sapiens
  source 1..402: mol_type = other DNA
cagccccttttccggctgagagctcatccacacttccaatcactttccggagtgcttcccctccctccggcccgtgctggtcccgacggcgggcctgggtctcgcgcgcgtattgctgggtaacgggccttctctcgcgtcggcccggcccctcctgcctcggctcgtccctccttccagaacgtcccgggctcctgccgagtcagaagaaatgggactccctccgcgacgtgcccggagcagctcccttcgctgtggaagcggcggtgtcttcgaagaaaccggaagcccgtggtgacccctggcgacccggtttgttttcggtccgtttccaaacactaaggaatcgaaactcggcggccttgggggcggccctacgtagcctggcttctggttgtcatg

SEQ ID NO: 912 - DNA, 107 bp, Homo sapiens
  source 1..107: mol_type = other DNA
acgccttttccggcccgcagcgcggcctgggctcccgcgtgtttaaaagtgcgcttgtggctgctgctgtcttaactcctgtgcttggcggacagacaggcgagatg

SEQ ID NO: 913 - DNA, 65 bp, Homo sapiens
  source 1..65: mol_type = other DNA
agtcctttctcgtcgctgctcggctcgcggcccgtggggtcggccccgccaccgttgccgccatg

SEQ ID NO: 914 - DNA, 312 bp, Homo sapiens
  source 1..312: mol_type = other DNA
cggcctccgccgcacgcgctggcggactaagagtggctggcgaagcgagcggccggcgcgggcccctggcgggcgggcggtacagccccaagcctgagacccggacctgagcatcgcaggttcgagtcccgccccgcctggggcgaagccgggggtggcggcgacctcgcggcgttgcaccggctctgtgagcacctcccctctgagcacttcccttgtgacaggccacttcccttgtgacaggcccaggacgaggtggccaggcggcccccatggcgtccctggtctaggcggagaaccgcctgggcgatg

SEQ ID NO: 915 - DNA, 351 bp, Homo sapiens
  source 1..351: mol_type = other DNA
ccctccctccacctcggagtctgcgcggcgcggccaggcccggccgaccgcgtctcggtcttcgcgtctgccagcctggctggcagtccgtctgtccatcccgccgcgccggggcagtctaggcggagcgggggctcaggcggcggcggcctcgacgcgagtgagtgtcgtggttggggtgctggacccagagtgcctaccctcgcctgcctgggcctcagtttccacatctgcacaatgggggtgaccatccctgccctgctggctgccaggagcggctgtgagtcttcaggcgtggatgcagcctgggggaagccatagggcgctttcacaggcctggccttcaccatg

SEQ ID NO: 916 - DNA, 27 bp, Homo sapiens
  source 1..27: mol_type = other DNA
gaaccttttttcacctcgtctgaaatg

SEQ ID NO: 917 - DNA, 117 bp, Homo sapiens
  source 1..117: mol_type = other DNA
cgccctcccacccgctcagacctggttgccagcccaacaggaagcggcccctcccggcttcggagccgccgccactcatctctgcccagctgctgccctccccaggaggcctccatg

SEQ ID NO: 918 - DNA, 254 bp, Homo sapiens
  source 1..254: mol_type = other DNA
gctcctttaaggcagcgaacgggccaagagaagcgtgtttcgccccctccgacgccaccgaggtagcggcttcacctttaaggcggcgcgggggctgctgggaaggccggcgggatggaggcggcgggaccggctcgcgggtgcgggtccgggtgaagcgggaggcagccagagtcggagccgggcccgagcaccaggcgcaggcccggcgcccgcctgcccgcaccctcgtcctcacagacgccacagccatg

SEQ ID NO: 919 - DNA, 178 bp, Homo sapiens
  source 1..178: mol_type = other DNA
acttcctttttctgcccactctggtaacttattgctctgctgggctctttcccttagggtctctggccctgttcttgccccagcatgacttttatcgggacgccgttgtggaagcctcacgcaggagccctgcccccgtggagaagatcccactggtgactccaaccctaccaccatg

SEQ ID NO: 920 - DNA, 648 bp, Homo sapiens
  source 1..648: mol_type = other DNA
gctcctcccactgccgttgtgggtaacgcggacgtggaagaacctcgtctgcggaggaaaaggtagatgttaaatggtaactacgcgcgaggttctgaggagccctgggaacaggaaggagaaaagaataccaaaagtgacaacagtttgccaatcgcagtctttaatctgataaagcggttatctcgtcttgagtcccaggtgccgagtcaatccccatacacagccgccgccattgcctcgagtccttgtgtctgactgtctgttcctgctgctgtatgacacagcacctcgaggcaaggaaataagaaaactgcctctgatccaagcagagaaggtctgcctgtagatctgctgtagggcttgtcaccattggaagcaaggtcctacttcagtggcagatctggtggccttggagtggctgaagaccaccaccctccacagggctgggcccatgcacagccatccttccctaccttgagtgagcttcctctgcatgttttctatatcactggcagagcctgtagttggaaaggggacagagtgactactggactttgtgtgaaaacaccaaccgggacaaaacttcagtcaaggctgagacgggtgggggtatataacttgtccttacgttaaacttggaacatg

SEQ ID NO: 921 - DNA, 24 bp, Homo sapiens
  source 1..24: mol_type = other DNA
aatcctttgcggtggttcaagatg

SEQ ID NO: 922 - DNA, 65 bp, Homo sapiens
  source 1..65: mol_type = other DNA
ggtcctcccgtaggaaccggcggactcggttggcgttgtggggcagggggtggtggagcaagatg

SEQ ID NO: 923 - DNA, 907 bp, Homo sapiens
  source 1..907: mol_type = other DNA
gggcctcctcgcctttgtgccatccgggtctctcgcgcgagcgatttagtctgaggcgaagcttcggagcggccggtactgttgaaagcgacaagtggaggcgccgctctagcggccgggactctgaactatggcggctagtgatacagagcgagatggactagccccagaaaagacatcaccagatagagataagaaaaaagagcagtcagaagtatctgtttctcctagagcttcaaaacatcattattcaagatcacgatcaaggtcaagagaaagaaaacgaaagtcagataatgaaggaagaaaacacaggagccggagcagaagcaaagagcgtgcttatgcgcgaagagactgaactgaagacgctgcagactcagatagcaaaataataagcctacttcatgataagggaagaagacatgaatccaaagataaatcctctaagaaacataagtctgaggaacataatgacaaagaacattcttctgataaaggaagagagcgactaaattcatctgaaaatggtgaggacaggcacaaacgcaaagaaagaaagtcatcaagaggcagaagtcactcaagatctaggtctcgtgaaagacgccatcgtagtagaagcagggagcggaagaagtctcgatccaggagtagggagcggaagaaatcgagatccagaagcagagagaggaagaaatcgagatccagaagcagggaaagaaaacggcggatcaggtctcgttcccgctcaagatcaagacacaggcataggactagaagcaggagtaggacaaggagtaggagtcgagatagaaagaagagaattgaaaagccgagaagatttagcagaagtttaagccggactccaagtccacctcccttcagaggcagaaacacagcaatg

SEQ ID NO: 924 - DNA, 590 bp, Homo sapiens
  source 1..590: mol_type = other DNA
ccgccttcccaccccccgcccttccactatggccgcttctgtgtggtgtggggagacgctggtcctccccgtcctcccatagcgcttattgcctcaccctcaccccctaggggccggatccaaaggcgctgcactccccaagccttggggcatcagccaggaaggtttcctacctcctaattcaggggcaggactcctcttttccccccacggggaaaagaggcagaaacttaggggtttccctcctttcttagggtcagacgctcttagggtccacttcttcaggggcggaagcctctcctacccttcccataggggcacaggcctttaccccactgtacttcggagccaacgcctttccctcagcactgccaccccagagtcaggacccagaggactgtgccttcgcccccaacgcaggcgcggccttttggagaggagggaggagtggagaggacaggggcccttgctctcccctccccaacttgttcctcttgccccccagtccctggcaatccagagatcccgatatctaggactgtccatccatccactccctgaccttttcccggctcctggctgcagccatg

SEQ ID NO: 925 - DNA, 396 bp, Homo sapiens
  source 1..396: mol_type = other DNA
tctcctttcctcttctcagacccgggagcgtccgggacgcggagcccggagctggggcgacgaggcgattgcgggggcctgggctagctgctggctaccaatattctactttctgtctctatgaatgtgactaccctggttacctcatataatctccctggaaaaggagacatgaatgtctgcaatgatacttcctgacaagaagttgatacaagaaaaggaaaggagattaacagctagtgagcagaatttcgaacagcaggatttcgtattttttgcttccaactgcacacttccgttgcccacttttaaatcagagatacctacactcaaaacccagacaaggcaaaaggatacttttcttgtatattttttgagatcgaagaaacgacaatg

SEQ ID NO: 926 - DNA, 269 bp, Homo sapiens
  source 1..269: mol_type = other DNA
ccgcccctttcacctcctggctccctcccgggcgatccgcgccccttgggtctcccctcccttccctccgtccgcgtctcctgcgccccctccctgcgctcgtcccgccgctcttcccgccgcccaacttttcctccaactcgcgctcgggagctggcgaggcggcggcggctcctcaggtcagtttgaaaaggaggatcgagctcactgtggagtatccatggagatgtggagccttgtcaccaacctctaactgcagaactgggatg

SEQ ID NO: 927 - DNA, 29 bp, Homo sapiens
  source 1..29: mol_type = other DNA
ctccctcttccgctgccgccgtgggaatg

SEQ ID NO: 928 - DNA, 37 bp, Homo sapiens
  source 1..37: mol_type = other DNA
cctccttctttcctgcctctgattccgggctgtcatg

SEQ ID NO: 929 - DNA, 31 bp, Homo sapiens
  source 1..31: mol_type = other DNA
agtcctttgcgcggcacctggcgacaaaatg

SEQ ID NO: 930 - DNA, 1100 bp, Homo sapiens
  source 1..1100: mol_type = other DNA
ccctctcttctccaccagccaacgtccgggaaaaacgagtaagtacaggttccttctgccaatccccgccggccacagctaactttcccgcccggcccctttctgtcataattgaggtgtccacaaccagccaatcaggaacgcgagagtatcccgcgtttgctttcgctcgccgaggcgcgtatcagtcggaattttggggagccaaccgcgccgtctgtccctggcaagccagcggcggtttaaaggaggtggcgggaagcctgtgtgtgcttcaaatcgtcaccctcatggtcgctccggtaagtgctgcggggcagcattttctctgaggaggagcggggacgggcgagactggcataagcgtcttcgcgagggagcaaggcggcctgtgggtcggcctcaccccggcctccgacctgaagatcccagcatgcagcgcgggcgcggggcccgacggaagccgggagccggccggaagcagttcctgcgctctggcttctgggtcctgtcctgcgcgatcgcggggtcttagacagctcaactcgccgagatgacctgggcacctctgcgttgaatcggcaaatactgatcaagccgcatttattctgctctcaggaactctaagtctagcagagaagatgaggcggtagaagttcatcaatggcttggctggaggacaagcaaattgaggacattggcaacggagtgatcaaaatgatagatcatgaggcctaaaatgaataaggaaagaagagaagtggcagaggctgagaacagaaagagagggtggaggggctgtaaatcttgaagattagggtataatatgagtatatgggtaagaattggaagaattgtgtaggaggcagtagtcaaaaagtagaagcagtttggaagagtagttacaaatatcaagagccaggtggctaaaaggtggagctataggtcattgaagctcaagaaactgagtctctagggcattggttaagtcatctgtctagacttcaaagttgtctaggatgataattcagaagactgatctgtgccaaagtcacaggtttttcacgactgaaaacaacatagcaaaataagccaagatg

SEQ ID NO: 931 - DNA, 76 bp, Homo sapiens
  source 1..76: mol_type = other DNA
cttcctttcacgctgtcgctgcccgtaggtggttgtggccactgtgcccggagggaggcggcggtggccagtaatg

SEQ ID NO: 932 - DNA, 73 bp, Homo sapiens
  source 1..73: mol_type = other DNA
cggcctctgcgtgcacgcgcctgcgtgctcgcgctcgcggttctggcgctgccggaataatgctgacagcatg

SEQ ID NO: 933 - DNA, 168 bp, Homo sapiens
  source 1..168: mol_type = other DNA
ccgccctttcctgtcgtgacttaacgcacgcaagcggctccagggtacgtccccgccacgcgcgctcgcaggatcggtgcgtggtgacgtttcgccggcgcgggcgccatcccggaagcgcgagcaaggccgccagatgtgcaggcagcggaggaggagaaagagatg

SEQ ID NO: 934 - DNA, 70 bp, Homo sapiens
  source 1..70: mol_type = other DNA
acttctttcttgcccgccaagcccgcagccacccgggcgcggcgggactcctagacccggcgctgcgatg

SEQ ID NO: 935 - DNA, 289 bp, Homo sapiens
  source 1..289: mol_type = other DNA
cgttccttttgtgacgccggctgtgagcgcctgagagtctttttgcctttcagagttaaggcctcactggcctgggaaaataattgctgccttttgcatccgcgttggctccgtccccaggatcttcccggttcagggacctggcgatttctgagtgttccggaatcccaataaccctgtttaaagaggaatggagattgccactgtccatttagattaatgaggtgtcctgaagtgatggtgacatcaatgaaaggagggttctgacacgttctcacctcgcgggatg

SEQ ID NO: 936 - DNA, 208 bp, Homo sapiens
  source 1..208: mol_type = other DNA
caacccttttcttccgcacggttggaggaggtcggctggttatcgggagttggagggctgaggtcgggagggtggtgtgtacagagctctaggacaccaggccagtcgcgggttttgggccgaggcctgggttacaagcagcaagtgcgcggttggggccactgcgaggccgttttagaaaactgtttaaaacaaagagcaattgatg

SEQ ID NO: 937 - DNA, 225 bp, Homo sapiens
  source 1..225: mol_type = other DNA
ccgcctcctcctcctgccgctgccgctgctttggctgctgcgtcatacgccccagagccgccgggacggaggggctgggcctggggaccccccggcctccgcctgcacgcccccccacgcccggacgtgccctctccgcgcgggggactcgcctaggtctcctacgtctgcccctgcccggctcccggcggccccagctgtcaccggcccccccaggatgcaatg

SEQ ID NO: 938 - DNA, 85 bp, Homo sapiens
  source 1..85: mol_type = other DNA
cccccttccgcctgacgcgcccccggcggcggccgcgcagccctggctcctcgcgggctcgggcggcggctgcggcggggctatg

SEQ ID NO: 939 - DNA, 358 bp, Homo sapiens
  source 1..358: mol_type = other DNA
ccgcctcctttccggagcccgtctgttccccttcgggtccaaagcttttggctcctccttgttccgagcccgaaggcccgccccttcacgtactcggagctcggatcccagtgtggacctggactcgaatcccgttgccgactcgcgctctcggcttctgctccggggcttcttccctgcccgcccggggccctgaccgtggcttcttccccggcctgatctgcgcagcccggcgggcgcccagaaggagcaggcggcgcgggggcgcgctgggcgggggaggcgtggccggagctgcggcggcaagcgggctgggactgctcggccgcctcctgcccggcgagcagctcagaccatg

SEQ ID NO: 940 - DNA, 284 bp, Homo sapiens
  source 1..284: mol_type = other DNA
acgccccttttttgctcagccgtcagccccgtctccgtctgaagagtgcttctgccctcatttgcctctccctgtgaccccggccccctcagactccgctgcgtcgtctctcggccccgtccagccgttcctgactgctcttcgccggagtccgcttcccaaccccctttcgccagagcccgagagctccgtcggctctgcgtcctggcggattgtcagtggcttcgccccgaggagagctgactgccctgggctgctgcctccggcagagctgagccaaaatg

SEQ ID NO: 941 - DNA, 465 bp, Homo sapiens
  source 1..465: mol_type = other DNA
ctcccttccccctctgtgggtcccgcgaggagactctcgggctttgaggtgagacctgaagttccgctggccggtagtgtagcaggaaagggcaggtcctcccgggtcgtgagccagtagcctcctggggtggcaaggtgtagagaggggggcgttgaaaggacacccgctacccggcctgctttctaggggtctctttggattgaggacatcagcagcagtggaagggattttactggagacctgtcactgtcagagccttaaaatatcaccgacggggccttaatgtcaccgaggtagagagaaaagggcagtagccctagagactattgcgacacagtgtgcccctcataagtttttccagggaggggttctgtactgagttgacgccccaggagctgagcaccaggctttgcatccttgggaactcagcaaacgtttgttcagccaattgcaggtagcatg

SEQ ID NO: 942 - DNA, 82 bp, Homo sapiens
  source 1..82: mol_type = other DNA
tactcccttccctcaggccccaggaagttgcaagagtaccatttgtcgcacactcggggaccgcgggtggccggaggagatg

SEQ ID NO: 943 - DNA, 83 bp, Homo sapiens
  source 1..83: mol_type = other DNA
gctcctccttcgcggcggtaccgcctctgtttctgcggcgattgaacagccgagctttgcggccgggatcgcggaaagtgatg

SEQ ID NO: 944 - DNA, 612 bp, Homo sapiens
  source 1..612: mol_type = other DNA
atttcctctctgctgagagccagggaaggcgagctctgcgcacacgggcgtccctgcagcagccactctgctttccaggaccggccaactgccctggaggcatccacacaggggcccaggcagcacagaggagctgtgaacccgctccacaccggccaccctgcccggagcctggcactcacagcaggccggtgctaaggagtgtggcgcgggctcgactcccactgctgccggcctcccgagtgactctgttttccactgctgcaggcgagaagaggcacgcgcggcacaggccggcctccgcttcccgggaagacggcgcactcctggccctgggttcttgctgctgcccaccctctgctccctgggatgggccccgaggcgagcagcttcagcacaggcctggccctgctccaggtgcaggaaggaggataaggccgggccgagaggcggcacacctggaccatcccatgggcctccgcccgcgccgccccgaggatgagtggtgatgtcctctagccacccctagcagcgtcggctctccctggacgtgcggccgcggactgggacttggctttctccggataagcggcggcaccggcgtcagcgatg

SEQ ID NO: 945 - DNA, 67 bp, Homo sapiens
  source 1..67: mol_type = other DNA
tcgtctttcccctcccatctcctcagatcggtggacgtgctcgcctccactcggggccaggtctatg

SEQ ID NO: 946 - DNA, 44 bp, Homo sapiens
  source 1..44: mol_type = other DNA
cctccccttttcggcccagtagcggcggctcagttgctgccatg

SEQ ID NO: 947 - DNA, 98 bp, Homo sapiens
  source 1..98: mol_type = other DNA
ccttctctttcggagttgttccgtgctcccacgtgcttccccttctccactggctgggatcccccgggctcggggcgcagtaataatttttcaccatg

SEQ ID NO: 948 - DNA, 81 bp, Homo sapiens
  source 1..81: mol_type = other DNA
aaccctttgccttcggacttctccggggccagcagccgcccgaccaggggcccggggccacgggctcagccgacgaccatg

SEQ ID NO: 949 - DNA, 81 bp, Homo sapiens
  source 1..81: mol_type = other DNA
cggcctttcctccgcgcccccgcgtccccagccggccgctccgagaggacccggaggaggcaggtggctttctagaagatg

SEQ ID NO: 950 - DNA, 26 bp, Homo sapiens
  source 1..26: mol_type = other DNA
ccgccccttacggcgccggagagatg

SEQ ID NO: 951 - DNA, 297 bp, Homo sapiens
  source 1..297: mol_type = other DNA
cctccctttttctacttccgaggctgcaaagtgcaacagcagactcttctgactcaggaaggccggtgctcctacccacttcctgttcctccatctccagcggacactgctctttcaagggcaggtctccagcccagctctctgaaaacattttgctgaaaatataagcaaacatcggccttgtcctccttgtgttcatacactgtggaagcttttctctgcctcctccgtgagagtgcgtggccgggagaccagaaacgtggtcctttctcttgcctgtgagctggtgcagagatg

SEQ ID NO: 952 - DNA, 64 bp, Homo sapiens
  source 1..64: mol_type = other DNA
cttcctccggctggcagcacgactcgcgtagccgtgcgccgattgcctctcggcctgggcaatg

SEQ ID NO: 953 - DNA, 27 bp, Homo sapiens
  source 1..27: mol_type = other DNA
aattcttttttccccaggcttgccatg

SEQ ID NO: 954 - DNA, 254 bp, Homo sapiens
  source 1..254: mol_type = other DNA
acttccctttttccggtccgccggattatgaatgacggccggcgcgagtattttccacataaggtggctgtcgtttttctcctggcgtctgtggaggcgagtggtctgcgggcagcagctcccagaggcagccttggaattccagctcggactgggcgggaaggcgcaggcggcccaggtcgccgacacgctcacgcaccctccctgcctggccgcgcctctgcgaccaggtgacccaatgaaagaagaaaatg

SEQ ID NO: 955 - DNA, 311 bp, Homo sapiens
  source 1..311: mol_type = other DNA
actcctttttctttccaaacagggaaaagtgttccacgaagcggtagcgcctttccgcctcgcgttttcctccctgaccctggtcccggctcccgtccgggcgccagctggtggggcgagcgccgggagcccatctgcccccaggggcacggggcgcggggccggctcccgcccggcacatggctgcagccacctcgcgcgcaccccgaggcgccgcgcccagctcgcccgaggtccgtcggaggcgcccggccgccccggagccaagcagcagctgagcggggaagcgcccgcgtccggggatcgggatg

SEQ ID NO: 956 - DNA, 118 bp, Homo sapiens
  source 1..118: mol_type = other DNA
cctcctcttgcggtggggggaaagcggcctcttactctaggcctttcggtttgcgcgagcgggcaggaaagcgtgcgtgcggctaagagagtgggcgctctcgcggccgctgacgatg

SEQ ID NO: 957 - DNA, 299 bp, Homo sapiens
  source 1..299: mol_type = other DNA
cctccttcttccactccccgcggcgcgagcggctgactgcccgtagaggaaacgacattcggagctgcgctcccgcccaggccggccctgacgcgggcctcgtcagccagtaacagggagcagaggtgggagttagcgaggcgaccacgaaaacggtgaaggtcggaaccgacagcctcctccgagaagggcaggagctgggaggaggcggcagcggcggcggcagaaacagcagcggcggcggcggcggcagctgggaggaggtggtgacggtggcaacggcagcgtcggggacgatg

SEQ ID NO: 958 - DNA, 816 bp, Homo sapiens
  source 1..816: mol_type = other DNA
ctttctcttttagccccgcctgcttcccggctccagctggggccggagaggctgagtggttggtacgctgctcgctggcctcccagtcttcccagcaaccggtgacactgcccgcgccagactgaccactagccgacgcgggcgagagggacaggagcgtgacctccccatcccgaggggccggacgctcgggcgcctccccgctccccccactcggaggccgcgcgcgccgttagccccttcctcgctcccccgccccagtcccgcagtccgggaggcgggggtcggcagccggctgagtgggaaccgcgcggtgtctgaggaggcagtcggcgaccggtttccacttcaagcgtgacccttttgcctgtgggatgagctccagcatggggtgaggtacagaagagagacttgaagagcgtgccttgggactcaagcgccaaacctgtaccctagcgagtgtcctactccgcatccgtaatggaaggaaatgcacatcttactccagaggcacaagaggaggacatcccatgcggctactcctgcccagcgtggtggggcagcagaagctccagagcccagacttgcaggctcacggtgcagggtgaacctggccacagctcaccctggaacagccacaatgtctgccccttagagaagaaccctgaaatcagaccagtttttgcggcctccccctttcctctctgttacagtgccctttccaggccttaagagaagtaaaacttagctgcagcgccaggaggtggaccccagagtgtgagtggcacgcttccctgtgaacccgtcctcaccatg

SEQ ID NO: 959 - DNA, 148 bp, Homo sapiens
  source 1..148: mol_type = other DNA
ccgcctccgtcccggctgcggcccctgccggttacataactcgttgcgggctccgcgcggtcccacttcccggctcccttcgcctccaggatgcgctgagccctacaacacccccagcggccgccggctcccccacgaggtgtgaatg

SEQ ID NO: 960 - DNA, 237 bp, Homo sapiens
  source 1..237: mol_type = other DNA
tgccctctgtccccgcggctgggtctcgtctgctccggttcctgggctcctaattcttggtccagcttcttccaggtcagtgtgcgggccttccacgctgccagcggaacactggaatggcggaaggggaacgggtctgcgcgtctgttgttcccagcgctctgcgaagcctgaaaaggaggagcaacctgtccagaatccccgcaggacaggaaaaggaggggaaatctcgacatg

SEQ ID NO: 961 - DNA, 673 bp, Homo sapiens
  source 1..673: mol_type = other DNA
tcccctttgtctccccactccccgcccaggcctggcccgcctgcctggccactcttcctccatcagcctggctggcagcagccttggactccgcccgtggagccctgggcctgttgacccaccagcttaggagcacccaccaagctctgggtaaggaagctcaccttctggggctcttctgggaaaatagaggtcaacgtggaggtaccaggccaccatgctcagtctcaagctgccccaacttcttcaagtccaccaggtcccccgggtgttctgggaagatggcatcatgtctggctaccgccgccccaccagctcggctttggactgtgtcctcagctccttccagatgaccaacgagacggtcaacatctggactcacttcctgcccacctggtgaggggaggctctgccccaggccgcggccttgagctcagagggggtacccaggcgggcagggaccgtccaggcccacgggctgcagcggcagtcgcgggggtccgcggcggcctgagcacgcgcccgccgcaggtacttcctgtggcggctcctggcgctggcgggcggccccggcttccgtgcggagccgtaccactggccgctgctggtcttcctgctgcccgcctgcctctaccccttcgcgtcgtgctgcgcgcacaccttcagctccatg

SEQ ID NO: 962 - DNA, 189 bp, Homo sapiens
  source 1..189: mol_type = other DNA
catccttcttgctcaaccactgggtgcacaggatggaaacttctattccctctctggaagacagcgcgtggcttggcttcacagagttgtggctggagaccgaagcagcccctttctcaggcttactgtcaccagtctgtctgtgttaggggagaggggagtccgctctgtcctgaaggcccagagatg

SEQ ID NO: 963 - DNA, 137 bp, Homo sapiens
  source 1..137: mol_type = other DNA
ccttcttctttcctgcctcaccttccaattcgtttgccgccgccgtcccgcagctgctgtttccggagttgccccttccccatgttccggggcaggagtccgcaaagcgaagatccgcccgccggttcctcatcatg

SEQ ID NO: 964 - DNA, 158 bp, Homo sapiens
  source 1..158: mol_type = other DNA
ccgcctttgctcggcggagacagcaggcagagagatgaggaaactgagacccagaaaggtggaagcacttgtctaaggtcacgcctccaggaagcagtgtgtccacgactccagtccaagtggtcaggctccagagcccacagtcccaggggtccatg

SEQ ID NO: 965 - DNA, 101 bp, Homo sapiens
  source 1..101: mol_type = other DNA
agccctcctcacacccccactgggctcctgcattaagcccggggttcgcagccgcagccgggatcgggcacccaggggcgggcgggcacggtagggccatg

SEQ ID NO: 966 - DNA, 509 bp, Homo sapiens
  source 1..509: mol_type = other DNA
catcctctctgggaatttaccgatgcccagaacgcccttctttcccccacacgaccctctcctagtctaactcctgggcgtgctttaagctcagctcaggcagcgtcaccttctctggaaagcccaaacccagccaccccactacccgctacccgcggcccacgctgatgaagacagcagaacacggaggccccgcgttcccgccgcgagagcaggagagaaagattacctcccgcgagctctagcgcgcccggctttccggcgcactccagggggcgtggctcgggtccacccgggctgcgagccggcagcacaggccaataggcaattagcgcgcgccaggctgccttccccgcgccggacccgggacgtctgaacggaagttcgacccatcggcgacccgacggcgagaccccgccccatccccgactgcctgaaccgcgccaggagacggaccgcaagtccagcgtacccacagacgactcaggcgggagacgagcggtgtcatg

SEQ ID NO: 967 - DNA, 192 bp, Homo sapiens
  source 1..192: mol_type = other DNA
cgttcttttaggggtggagccggcaggaaatttaaactgaagccgcggccgaaaacgccaagagattgatgctgtagctgccctgagataaccaggactgtggaatcgggaagagctcatggagctcgcgaatgtaatacggaggcctctgaggaaggagtacggaggccgagaaggagccggcatttgatg

SEQ ID NO: 968 - DNA, 13 bp, Homo sapiens
  source 1..13: mol_type = other DNA
atttccttttatg

SEQ ID NO: 969 - DNA, 439 bp, Homo sapiens
  source 1..439: mol_type = other DNA
ggttcctttcctcactgcacgctcttgcccctcctcttttctctcctgcccgtgttcttcccgccgcctgacctggcccgcccgcctttccagtctggccgggcgggggcctgaagcacggcggctcgggccgtgggaccgtgttcacaccctttccagaaattcttggctggtaaccgcgaaaccgactggagcaggagctgggagaactggagaaaactgctctaatctcacttgactccagctaggagctgatgctgcatcgtaataacatttgcagagcgctttcacaggcgctggagtgacttgtctgagattcctccagaactgagccctttgttggaaccataccccagcccatggtcccatgactaggtggatagtactccttgtacctcctgcaacccagaaccctggctgaccactttgaaggaggatg

SEQ ID NO: 970 - DNA, 363 bp, Homo sapiens
  source 1..363: mol_type = other DNA
cctcccctttctgctgttaccgggagcgcggtggccacggaacgctgcccggagccgcgcgagggaggacccgacgcgcggcgtttacccagcgcagcgttccaccgctcgggtttggctggataaaataaaaaatggggatattgacctcctgtcactactgcatggactttgatggtttccaatcattactttctcctctgtgtcaatctgcctcttcgagaaattcatactcctgaatagctctccagacccccagctggccatgtggtgagttcagggcccaaatcaagtagtaccagcaatcagggaactcctatctgttttgaatggattcacaccagccacaagcctggaaagatg

SEQ ID NO: 971 - DNA, 113 bp, Homo sapiens
  source 1..113: mol_type = other DNA
ctccctcttcccccgccccgccctgggccaggtgttcgaatcccgactccagaactggcggcgtcccagtcccgcgggcgtggagcgccggaggacccgccctcgggctcatg

SEQ ID NO: 972 - DNA, 155 bp, Homo sapiens
  source 1..155: mol_type = other DNA
gggcctttgtccctcgctgtggcctgagctccaggtctcgtcttcagcgctctgtgtcctctgctcctagaggtccaggctctgtggccctgtgacccgcaggtattgggagatctacagctaagacgccaggaacccctggaagcctagaaatg

SEQ ID NO: 973 - DNA, 236 bp, Homo sapiens
  source 1..236: mol_type = other DNA
gctccttttgcaggctcgtggcggtcggtcagcggggcgttctcccacctgtagcgactcaggttactgaaaaggcgggaaaacgctgcgatggcggcagctgggggaggaggaagataagcgcgtgaggctggggtcctggcgcgtggttggcagaggcagagacataagacgtgcacgactcgccccacagggccctcagaccccttccttccaaaggagcctccaagctcatg

SEQ ID NO: 974 - DNA, 55 bp, Homo sapiens
  source 1..55: mol_type = other DNA
gccccttcctcactaccctccaaatcccgctgcagccattgccgcagacacgatg

SEQ ID NO: 975 - DNA, 358 bp, Homo sapiens
  source 1..358: mol_type = other DNA
cgccctttaccaacatggctgctgacgccacgccttctgggactcgtagtccggtcctcgcgcgctttcttacctaactggggcgctctgggtgttgtacgaaagcgcgtctgcggccgcaatgtctgctgagagttgtagttctgtgccctatcacggccactcccatttctggtgccgtcacgggacagagcagtcggtgacaggacagagcagtcggtgacgggacacagtggttggtgacgggacagagcggtcggtgacagcctcaagggcttcagcaccgcgcccatggcagagccagaccgactcagattcagactctgagggaggagccgctggtggagaagcagacatg

SEQ ID NO: 976 - DNA, 175 bp, Homo sapiens
  source 1..175: mol_type = other DNA
ttgtctctctgtcagtggcggctgctgcctgctctggaggcaggctgggcggtggcggccgagactggcgggggtggacgcccgggccgggctgcgcccgcttcttgcagctgtgaattcctttggacaattgatgatatttatcattgtgcccagtttctacaaataaaagatg

SEQ ID NO: 977 - DNA, 123 bp, Homo sapiens
  source 1..123: mol_type = other DNA
ctgccttcatctctccatctctgcgctgctgccggctgcgccatccagcacccagactccagcaccggccgaggacccccactccggctgcagggaccctgtcccagcgagaccgcaggcatg

SEQ ID NO: 978 - DNA, 271 bp, Homo sapiens
  source 1..271: mol_type = other DNA
ccgccccttccccggagcctcacttccgtcacagtcctgtttctctccctgttgtccctgcctctttttccttcccgccgtgccccgcggccgggccggggcagccgggaagcgggtggggtggtgtgttacccagtagctcctgggacatcgctcgggtacgctccacgccgtcgcagccactgctgtggtcgccggtcggccgaggggccgcgatactggttgcccgcggtgtaagcagaattcgacgtgtatcgctgccgtcaagatg

SEQ ID NO: 979 - DNA, 132 bp, Homo sapiens
  source 1..132: mol_type = other DNA
cgttctttggccctgtgacacgtagcaacggggctggttcagggtctgaaacagagtttgggggttgtttgggattagtgaagctactgcctttgccgccagcgcagcctcagagtttgattatttgcaatg

SEQ ID NO: 980 - DNA, 272 bp, Homo sapiens
  source 1..272: mol_type = other DNA
cctccctttccagagcccccagttccttagaaaccaggcggcgcgttcccggtggcggcgccctggactcccgggcccgcgcatccccgccagccttccttaaggcggatgggtggcccccgagaccccgtcggacccatggtttccagtgcagcgcggagtgggcgatgccagcgtgccaggagccatgtctgaccaggacgtttggaagatcatatccatgccagaggctcttgtgaggagatgagttggtaaagagagaggctgggatg

SEQ ID NO: 981 - DNA, 275 bp, Homo sapiens
  source 1..275: mol_type = other DNA
ttccctttcgaattccagggtatatctgggaggccggaggacgtgtctggttattacacagatgcacagctggacgtgggatccacacagctcagaacagttggatcttgctcagtctctgtcagaggaagatcccttggacaagaggaccctgccttggtgtgagagtgagggaagaggaagctggaacgagggttaaggaaaaccttccagtctggacagtgactggagagctccaaggaaagcccctcggtaacccagccgctggcaccatg

SEQ ID NO: 982 - DNA, 155 bp, Homo sapiens
  source 1..155: mol_type = other DNA
ccgcctccctgcgccccgcccctccggctagctcgctggctcccggctcctcccgacgtctcctacctcctcacggctcttcccggcgctctcctggctcccttctgccccagctccgtctcggcggcggcgggcagttgcagtggtgcagaatg

SEQ ID NO: 983 - DNA, 63 bp, Homo sapiens
  source 1..63: mol_type = other DNA
cttccttctttgccaggcagacgcccgttgtagccgttggggaaccgttgagaatccgccatg

SEQ ID NO: 984 - DNA, 189 bp, Homo sapiens
  source 1..189: mol_type = other DNA
ctgtctctaatctctgcaacagccgcgcttcccgggtcccgcggctcccgcgcgcgatctgccgcggccggctgctgggcaaaaatcagagccgcctccgccccattacccatcatggaaaccctccaggaaaaagtggccccggacgcgcgagcctgaggattctgcacaaaagaggtgcccaaaatg

SEQ ID NO: 985 - DNA, 68 bp, Homo sapiens
  source 1..68: mol_type = other DNA
tgctcctttctgcccgtggacgccgccgaagaagcatcgttaaagtctctcttcaccctgccgtcatg

SEQ ID NO: 986 - DNA, 155 bp, Homo sapiens
  source 1..155: mol_type = other DNA
gggtcctttgtctctcggtgcagccggagctccaggtctcctcttcactactctgtgtcctgtgctcctacaggcccagcctctgtggccctgtgacctgcaggtattgggagatccacagctaagacaccaggacccctggaagcctagaaatg

SEQ ID NO: 987 - DNA, 83 bp, Homo sapiens
  source 1..83: mol_type = other DNA
cggcctctagccacaccgagtccgccgcggcgtccagggtcggcagcaaccgcagccgagcccgagcgggtggcggcgccatg

SEQ ID NO: 988 - DNA, 126 bp, Homo sapiens
  source 1..126: mol_type = other DNA
cattcttctgcgacggcgcggacctggagcttccgcgcggtggcttcactctcctgtaaaacgctagagcggcgagttgttacctgcgtcctctgacctgagagcgaaggggaaagcggcgagatg

SEQ ID NO: 989 - DNA, 26 bp, Homo sapiens
  source 1..26: mol_type = other DNA
gtcccctttcctcgcaggacctcatg

SEQ ID NO: 990 - DNA, 159 bp, Homo sapiens
  source 1..159: mol_type = other DNA
ctttcttcctcttggcttatattagggataggggatgtggtttgttacaaaggatgagtattttgatagcttctcattccttgaactattctgcaggtttataacaaagctcagaaaatactaaaggttaaaggagaattgagagctgccaaggaaatg

SEQ ID NO: 991 - DNA, 89 bp, Homo sapiens
  source 1..89: mol_type = other DNA
cttcctttctcggaaacgcggcgcggccggctgccggaaaacagggcagacctgtatggttcgtttattcctggggttgtcatatcatg

SEQ ID NO: 992 - DNA, 243 bp, Homo sapiens
  source 1..243: mol_type = other DNA
tattcttttttagtgcagcgggagagagcgggagtgtgcgccgcgcgagagtgggaggcgaagggggcaggccagggagaggcgcaggagcctttgcagccacgcgcgcgccttccctgtcttgtgtgcttcgcgaggtagagcgggcgcgcggcagcggcggggattactttgctgctagtttcggttcgcggcagcggcgggtgtagtctcggcggcagcggcggagacactagcactatg

SEQ ID NO: 993 - DNA, 219 bp, Homo sapiens
  source 1..219: mol_type = other DNA
atttctccatctggctctcctctacctccaggcaggctcacccgagatccccgccccgaaccccccctgcacactcggcccagcgctgttgcccccggagcggacgtttctgcagctattctgagcacaccttgacgtcggctgagggagcgggacagggtcagcggcgaaggaggcaggccccgcgcggggatctcggaagccctgcggtgcatcatg

SEQ ID NO: 994 - DNA, 951 bp, Homo sapiens
  source 1..951: mol_type = other DNA
ccttcctttccccagtgttgagcgcggtctcgcctccgcttcctcctcactccgcctgccggctgggaaactagggcaccagtacgatagttccggcaccggaaaagagggctgatgactgggcccgggggccgccgcaacgacccttggggccggcaaagagccagagagggtgctcacacttccaagcaccccacaccaaggacaggctggacggcaaggcggagacgcggggcttgggccctcagaccggggacagcaggaggttgggccaagggccaggacttcccgtcacaatttcatttgttgatcccggcaccgccaggtaaggggggccctgagtgaggctaggtatctggtacggataaagttaggtatagagtagagcggctgcccgctcagggttatccctaaagacagttggaggagagttgcttggggcctcggggatgcactgggcgggatcagggcttacacctaggactggcaaaagagcgggacccggcagaggcggggcttgccgaagggacgagcctctattcaggaaatgcacgagctttggggcggggctcaaagaaaggggcggggcttccggggcccgcgtcctggtgagctgcgcgtctgcgcgaggattgggcgagagggtggggccactcaacgctgaggcggcgaatggccggagcagacttaaatcaagaggctggggacctctaagatcaaagtttggggcggggcctaaggagggggcggggcctccagattcgagacctggaagggctggggcggcgcttggggcggccctgccgccgcctcccgttctcccctccgcagcggcggcggtggcggagaaggaactcgacacgcaccgaccgccctcccgccccagccgaagcggaagctgtagcccgctctgggccggggccatgggcgccccgcgccgcccgggtcatg

SEQ ID NO: 995 - DNA, 42 bp, Homo sapiens
  source 1..42: mol_type = other DNA
ggctctttttgacagcccccagtgcgaaaggctgccagcatg

SEQ ID NO: 996 - DNA, 60 bp, Homo sapiens
  source 1..60: mol_type = other DNA
ggttctctctgacgtgggagccgccgtcgctgccgccacccggaggctcttgtcaggatg

SEQ ID NO: 997 - DNA, 177 bp, Homo sapiens
  source 1..177: mol_type = other DNA
aggtctttctccacaaaagaaataacagcgtgcattacgtattcagatactgctttgcttcatcctctctaaaatttaacaccgaggagtttaagaaatgaagataaggaactcgaattatttttaaactttggatcaatgtaaaggcaatctaatatttggaaaatacttgcaatg

SEQ ID NO: 998 - DNA, 267 bp, Homo sapiens
  source 1..267: mol_type = other DNA
gcctctccttgggccccttctctccccctttcccctccctgctggttcctggcatcgccagatgctgcgcagcagtctccgattccccatcaccaattcggctggcgtctccgagaccgcggactcccgtagggtccccgtggccccgagttgtagtcgggacaccccggccgcgggtgatcgtcgggtctccacgcgcccgggtcgctgacgcggatccggcctcggcgccttctcagggcgccctgcaaggccgcaggcaggatg

SEQ ID NO: 999 - DNA, 86 bp, Homo sapiens
  source 1..86: mol_type = other DNA
gctcctcctgctgtgggaccgctgaccgcgcggctgctccgctctccccgctccaagcgccgatctgggcacccgccaccagcatg

SEQ ID NO: 1000 - DNA, 882 bp, Homo sapiens
  source 1..882: mol_type = other DNA
gggtcttttaggagagcactgctgcagccggcagtggagagcctgggcagggagacagggagaaaactccggcagcagggtggtctctagggctgacctcggagcctggggacaggggagcctatgccgcactgaaggcgggacgctgtaagcgaggagcagctgggcctgggcggactcctcggccaatcagcctcggtcagcagcaccctcaggcgcagggcactgtttgggcattgcctagagatccgacaccccgcccagatcagcgcagggaggcgaaagcgacagccgggcgcgggaggagaccagggcagctgtcccctccgcgagggtggccctcgaggcaatgcgggtgggggctggtgaggaggcggaagggccgaggctgagtgggaggggccggggcgccagggctggagcgcgcggctcgggggtggaggctgcagagccagcgagcgagcgaggggcgggggcgcccgggccggcgcgcaggaggggcgggggcggcggggaggggggctcgggctgcgtgtgccggagccggcgggggcggcggtgcgtgcgcatgacgcggggggagggcctgggccgcgcgctcccggtcccgttgttgttgccgctggaggctgctccgaggcagcgggatcacggcgctgggaagcgctcggcagcggcggccacagcgtgcgcggcggcgcctcctggcctcggcctccggcccccggcccccggctccatgcgctagccccgcgccgccagcccagtagtcccggccccgccagccccgcgctcccgctcgccgctgccgccgccgccgccgccgccgcctccgccgcgccgccccgggcccgcctcgggccccacggctccgaagccatg

SEQ ID NO: 1001 - DNA, 52 bp, Homo sapiens
  source 1..52: mol_type = other DNA
ctgcctctctcagtccgggtttggagactcctgcgtcctccgacttttcatg

SEQ ID NO: 1002 - DNA, 225 bp, Homo sapiens
  source 1..225: mol_type = other DNA
cattctctgcgaccggcagccgccaatgggaagggagtgagtgccacgaacaggccaataaggagggagcagtgcggggtttaaatctgaggctaggctggctcttctcggcgtgctgcggcggaacggctgttggtttctgctgggtgtaggtccttggctggtcgggcctccggtgttctgcttctccccgctgagctgctgcctggtgaagaggaagccatg

SEQ ID NO: 1003 - DNA, 23 bp, Homo sapiens
  source 1..23: mol_type = other DNA
gtttctctttccgggacaacatg

SEQ ID NO: 1004 - DNA, 220 bp, Homo sapiens
  source 1..220: mol_type = other DNA
cagcctctagcctgggattccctgcgcagccaacaacagaaaagaaaaccagctcccacacagaggctcccggctgcgcagaccttgcccagcacaccagattgccagctccgagacccgggactcctcctgtcctgggccgaatgctcttttagcgcggtagagtgcactttctccaactggaaaagcggggacccagcgagaacccgagcgaacgatg

SEQ ID NO: 1005 - DNA, 547 bp, Homo sapiens
  source 1..547: mol_type = other DNA
ggctctttcggcttccttcctcgctgggccggctaaacccggccgcagcagcaccggggtgataagtgtccagggcaggaggccagcgatgttgccttgctaaccgggtatctaagagaaacagggtctttttattcttaggctcgacagtctgacggccctttttctgaacgggaccctgcaggtcttccgcctgctgttgcattaaatttgggggtggaagaggcttctgcgttgttccttacccgcaacgatgaccatggctttgccttctttaaaattgaggcctccaactctgacgctgactggagaattgaaacccgaacacacattgggctcttttggcacttgactagagctaaaacctcgggattcagcgggcaagcgttgctcagcaacggcgcgtaggctgtgtgcggttggctggagccagaccccaccccggcctcggcccatgctctagaggggacgttgccccaatcctgaaggacttcggcactcgagacctgtggatgccgcgttgctgtggcctgcgggggtgatcatg

SEQ ID NO: 1006 - DNA, 80 bp, Homo sapiens
  source 1..80: mol_type = other DNA
ccgtccctctacgcgttttggttcccggttggtgcttcctgttcgcagctgcggcacttcaaggttactgactttttatg

SEQ ID NO: 1007 - DNA, 266 bp, Homo sapiens
  source 1..266: mol_type = other DNA
gggcctttctggacttggactccttgggagtcgtttctcggccatttgacccgtgggacttgtgggttttgtgctgctttttctttctttcttccccttttccaacttcagcaatacacccagatgttagtcgagtcacgtcccgccgccctctgcccttgaaatgctggcaagtacgcagccccgcgatcgtcacgtgacgccggggttcagcgtatccttgctgggcaaccgtcttagagaccagcactgctggctgcaccatg

SEQ ID NO: 1008 - DNA, 101 bp, Homo sapiens
  source 1..101: mol_type = other DNA
cgctccctcggtgcggcgggctgcgtgcgcgagtgggaggtggcaggcctgcgactccggccttgtccgcgcccgctctcggcgcgacgtctccagccatg

SEQ ID NO: 1009 - DNA, 225 bp, Homo sapiens
  source 1..225: mol_type = other DNA
ctccctttctctcagcatcttcttggtagcctgcctgtaggtgaagaagcaccagcagcatccatggcctgtcttttggcttaacacttatctcctttggctttgacagcggacggaatagacctcagcagcggcgtggtgaggacttagctgggacctggaatcgtatcctcctgtgttttttcagactccttggaaattaaggaatgcaattctgccaccatg

SEQ ID NO: 1010 - DNA, 18 bp, Homo sapiens
  source 1..18: mol_type = other DNA
cagccctttttgcaaatg

SEQ ID NO: 1011 - DNA, 300 bp, Homo sapiens
  source 1..300: mol_type = other DNA
gagcctcttgcttgctgtgactggtggagctgccgcgctgtccgcgttatctcctcccggtgagaacgaaccgcagtgtccaccggcgaggagccagccctgtcccggtcagagaaagacgacgaggatacctgggagcgggcggcggccgggctgggccgcgccggtgcgggctggcgactctgctcctccgcttgctgctgtctctgggaactgggtgccagcgctgaggggcttccagcggacagggacccccttccccggctcccctgcccaccctgccggggagggcggaagatg

SEQ ID NO: 1012 - DNA, 33 bp, Homo sapiens
  source 1..33: mol_type = other DNA
tgccctctctcatgaccccgctccgggattatg

SEQ ID NO: 1013 - DNA, 27 bp, Homo sapiens
  source 1..27: mol_type = other DNA
ccgcccctttggagctacttcctcatg

SEQ ID NO: 1014 - DNA, 270 bp, Homo sapiens
  source 1..270: mol_type = other DNA
tcgcctcttcgcattgtgagctctcgcggtaagaggctgaggagccggcctgcaacctgccggggcggctccgctacgcgcagccgcctcagtggcttcctccacagccacctccggagggatctggctgaggaggaagtggaggtgtcactggccccggcctttgccccaatcttgtgtgggcactgaagggggactacaggttcgagagttatgggtgctacatgtgtgctttcagagcagtagtgtgaggaagcttggagtgggatg

SEQ ID NO: 1015 - DNA, 146 bp, Homo sapiens
  source 1..146: mol_type = other DNA
cggtctttgtggcttgcagctcggggtgggtggctcatttcctggccgctcctgggcttcgcggaaagaagagattactcacactccttcgcaagcacagaaccagttgtactgagctttttgctaagctgtttcagccaagaatg

SEQ ID NO: 1016 - DNA, 35 bp, Homo sapiens
  source 1..35: mol_type = other DNA
gctcccttcccggcggcctttgcgggaacaagatg

SEQ ID NO: 1017 - DNA, 806 bp, Homo sapiens
  source 1..806: mol_type = other DNA
cttccttctccatattgtatactggaattgaagccaaggaggtaccattttgctcgagggcatggcctaagccggtcagctaaggccatgttaatacggggctgtcccatctctctgcggggcgcgacagctggaagagccgaacggataagagaagaggaggtgagaggagctgtacaccacaagaggcactgagggactcaggataacgggatgaagccgtcagtgcccccagaaacgaagcggccccggacgaatttctgagtcaccgtcgcgagaaagcgggctgagccgccattttgaagcctggcaaaccgaagcaagaaatgctgccgtgttggatctttgccagccttcgtgccgaatgggagcaggttggagggagggagagccaatatacactatgggctgattaagcccggttggctgccatgttgttaacgagcaccgatttcctctacttttgtcgaagaagtttattgtgggtcagggacgtcaggtcgcttgccttcgtttactgtggtcatgattgagcatatgaggacggccattattgttgggggcaaatggaaatgctctaggcggggccatttttcttaggggcaagctgtcgtcacccttgtcaactggttcggatgaagcccctgtggccgccatcttgatctcgggcggccccgataagggaggcggagtgtgcggagaggaggcggggcaactgcgcggacgtgacgcaaggcgccgccatgtcttttgagggcggtgacggcgccgggccggccatgctggctacgggcacggcgcggatg

SEQ ID NO: 1018 - DNA, 18 bp, Homo sapiens
  source 1..18: mol_type = other DNA
ctgccctttcccaagatg

SEQ ID NO: 1019 - DNA, 206 bp, Homo sapiens
  source 1..206: mol_type = other DNA
ggccctccctttcatcagtcttcccgcgtccgccgattcctcctccttggtcgccgcgtccttggctggcgttagagacagggtttcaacgtgttagccaggatggtctcagtctccagaccctgtgatccgcccgcctcggcctcccaaagtgttgggattacaggtgtgagccaccgtgcctggccgaggctccttcttttatg

SEQ ID NO: 1020 - DNA, 73 bp, Homo sapiens
  source 1..73: mol_type = other DNA
cgccctccccgccgtggattggcccgcggcgggacccgtcagccgcggttgtgtctgggaaggagagaaaatg

SEQ ID NO: 1021 - DNA, 935 bp, Homo sapiens
  source 1..935: mol_type = other DNA
atttctctcctccctgggggtctcagtgcatctccttctcctctctgcctgcctcctccctcaccgaagggttagcggacacccatccttttctgcttggggaccccaccaccacccgcaacactgccgctgtctcttcttcaccgtatccttctctacccaccctcttctctcttctcttctccctgcccctttaaatctgcctggcccagcctcccccgtgatgctgggatggagcaaacattgatttgtgctgggatggaatcggaattttgatttatttttcctctcccaaccataagaagaaaaaaataataaaaacaccccctcttgagagccccctccccctttgcatccagctcccagctcttcttccctatctccatccaaggcagattttttcccctacactattctcatcttcccccacccttgccactacctcgcccccccacccagcctgctcctccagctggggagagaggggactctccggactcccccacctttcctctctgggttggagcagtctctccggaaggggagggggcttggcttgtccgggcgaggtgggagtggaggtatcctgccatggatgctgtgccggggaggcagcctgagccccagcccacatgagacgccgaagaaccggggcagaggggtcctgacagcagccagggaaacgggtgccctacgattctgcccagccccctctcaggacccccaaactgccatccacactcgacacttcggggttctagccactcaggatgagggtccggccctgcctgccctcgctggggcccccccgcccggccccggtctaactgcccccgccccgaggcctcgcccggctccaaggcccccagcaggctctccagtcccaggatgcgctgagccgccggggggctgaggccgcgccaactacatgcatg

SEQ ID NO: 1022 - DNA, 154 bp, Homo sapiens
  source 1..154: mol_type = other DNA
ttttctttctcctcctccaaccttggcggaggccacgactcaggcgccacagctgggggctagaggccgcggaccatggtgcggggcagccaccgctgaagtcagcaaaaccgagcctggcctgaggcaggctgcgcgggaggccaaagccatg

SEQ ID NO: 1023 - DNA, 194 bp, Homo sapiens
  source 1..194: mol_type = other DNA
cgctccttctttctggccggatgtgtgctgagacccagagtcacccaggggtctccgtcacgtgccaggagtaggcagaagtgggctgtgacagatcaggaaacagagctcagtgcagcccactaaattgctcagggccctacagctaacaagcggcagaggcaggatctgcactcaggagctgcttggagatg

SEQ ID NO: 1024 - DNA, 73 bp, Homo sapiens
  source 1..73: mol_type = other DNA
ggctctctctgcggcttggcccgttagaggcggcttgtgtccacgggacgcgggcggatcttctccggccatg

SEQ ID NO: 1025 - DNA, 120 bp, Homo sapiens
  source 1..120: mol_type = other DNA
agttctcttcacggagccgcgcggctgcgggggcgcaaatagggtcagtgggccgcttggcggtgtcgttgcggtaccaggtccgcgtgaggggttcgggggttctgggcaggcacaatg

SEQ ID NO: 1026 - DNA, 287 bp, Homo sapiens
  source 1..287: mol_type = other DNA
gttcctttcctgggcatcagcttgcctgctctcagcctaagctctctcgccaaccgtggtggctccttgcgttcctacatcctctcatctgagaatcagagagcataatcttcttacgggcccgtgatttattaacgtggcttaatctgaaggttctcagtcaaattctttgtgatctactgattgtgggggcatggcaaggtttgcttaaaggagcttggctggtttgggcccttgtagctgacagaaggtggccagggagaaggcagcacactgctcggagaatg

SEQ ID NO: 1027 - DNA, 31 bp, Homo sapiens
  source 1..31: mol_type = other DNA
tctccttctacggatatctgtggaccttatg

SEQ ID NO: 1028 - DNA, 161 bp, Homo sapiens
  source 1..161: mol_type = other DNA
gcttctttccgcccggctccttcagaggcccggcgacctccagggctgggaagtcaaccgagctcccttccaggtcaatccaaactggagctcaactttcagaagagaaagacgccccagcaagcctctttcggggagtcctctagctcctcacctccatg

SEQ ID NO: 1029 - DNA, 197 bp, Homo sapiens
  source 1..197: mol_type = other DNA
cctcctcctttcctccctctactctgacacagcacttagcacctgaatcttcgtttctctcccagggaccctccattttccatatccaggaaaatgtgatgcgccacaggtatcagcgtctggatcgccacttcacgttttagccacaagtgactcagtggaagatccagagtcaacagaggctcgtcaggaagatg

SEQ ID NO: 1030 - DNA, 112 bp, Homo sapiens
  source 1..112: mol_type = other DNA
caccctttcactacttctcccccggactccttggtagtctgttagtgggagatccttgttgccgtcccttcgcctccttcaccgccgcagaccccttcaagttctagtcatg

SEQ ID NO: 1031 - DNA, 147 bp, Homo sapiens
  source 1..147: mol_type = other DNA
tttccttcctctcttcccttcgcagaggtgagtgccgggctcggcgctctgctcctggagctcccgcgggactgcctggggacagggactgctgtggcgctcggccctccactgcggacctctcctgagtgggtgcgccgagtcatg

SEQ ID NO: 1032 - DNA, 128 bp, Homo sapiens
  source 1..128: mol_type = other DNA
gcccctttctttccttcgcttcctcttttagagaatgtccggattgctattggactttggagcgtatggctccaaatcaactcattggctaaaacttgacggaaaatggtggttaggtggccagaatg

SEQ ID NO: 1033 - DNA, 314 bp, Homo sapiens
  source 1..314: mol_type = other DNA
cggcctcttcccagcgttcctcctccggccccaggtcaccgccagcacgcgcctgcttcccgtctgcgcgagtccacgcagctccccagatcaagaagctgaggccccaggttacacactaaagtaaatggcagaggcagaaataacacctatgtcctcctgaccccaaggcatgttcttaaagttctggaaacctcctggaggcttccttgctgctcctctgggactgccaccctgggcagggtgttctgtggcccctcatcatcgtggttttgaaccacaggcccttcaccagcacagcagcagcaggcatg

SEQ ID NO: 1034 - DNA, 127 bp, Homo sapiens
  source 1..127: mol_type = other DNA
catcctcccgccagcctgcccgcctgctcgccggcgcccggagcccgctctggccgcttgctttttgctgagaaagcttcctgccctggaagatggcacccttccccatccagacaccttgggaatg

SEQ ID NO: 1035 - DNA, 197 bp, Homo sapiens
  source 1..197: mol_type = other DNA
cttcctccttttcacggcgtcttgcattactattgtgcggctgcaggaggtgtcgagcggcgttatttttttttgcggtttgcctttttttttcttttttttttttttggaaccgcggttgtttaaaagcctgagggaacctggagaggggctcccactccctaccctctttcctccgagtttgtgactccgagatg

SEQ ID NO: 1036 - DNA, 180 bp, Homo sapiens
  source 1..180: mol_type = other DNA
ggctctttgtcgaagctagaggaccggcaggcggcagcagcaactacggcggcggcggcagaacccagcagcgatgtggaggtggagacccacaggagccccggacttcacctgagctacctcagtggtcaccaagagtggcaagataaagaaaaccctgagttgggcgggaccaggatg

SEQ ID NO: 1037 - DNA, 119 bp, Homo sapiens
  source 1..119: mol_type = other DNA
ccgtctttcagtttcacttttgttttcctgctcccagcagggttaggcttgctgaggggcaggcacaggagtcctggctgagctcatggcctgaggctgcctagcggccacggggaatg

SEQ ID NO: 1038 - DNA, 20 bp, Homo sapiens
  source 1..20: mol_type = other DNA
ccgcccttccttgtaagatg

SEQ ID NO: 1039 - DNA, 509 bp, Homo sapiens
  source 1..509: mol_type = other DNA
ctgcccttccgcagcgatggcatcccgggtgagtatcggccccggccgagcccccaaggcgggcgggcagcgcggcagggccgggacttgagcggaggaccgagtaggcgcaggtgtccgggcccaacaggaccaggaaggtgtcggggttggaatgagtgggtacccgggccggggacggtgcgagagggtgccttgcttgggagcggaacgagaaggtacttgggtcagggaggtgatgcccgggcctggaacgtggcggggattggagcaggcgcgcaggtacccgatccgaggcggggagagcacccgggatggaaggagcaggcgtgcgggccgtgagcggcgccagagggtacctggctctgtggaggggccctctggtatgtgtgtccctgtccttctggggcgtggatggtgcctgggacccagctggcaaccagttgaagacgttctccttggaagctcttggccctgaggactttgcctggggcattggccctgccatg

SEQ ID NO: 1040 - DNA, 463 bp, Homo sapiens
  source 1..463: mol_type = other DNA
gcgtctcttccggcgtctaggggggtgtcctgccggcgcgcgggccctgcggccattttgggcttcgcttccaccgcaccagccggcctacccagtccttccggtatcgcgttgctcaggggcttttcaaccctctgtcagtcggaaaaccatcgccgaggccgtggggggactcctatccatggtgttgaagcgtcgagccgactagggaacctccttccccgccaggatggaagtcgcatcagtcgccgcctattgcgcgggctgttcttccctgtgttctgccgcccgctgccgcattcgctgccctctgtggcttttctgctggctcgaagatcggcctggagcagcgacgccaccgctgggcaaggccgagactctgtaggcttcctccgaatcccgtcgacctccagccgctgagcgccgcggccctacctgagagactgtcaagaaaaaggagatg

SEQ ID NO: 1041 - DNA, 51 bp, Homo sapiens
  source 1..51: mol_type = other DNA
ccctctcttcgcggagcggcgccgcgtagcttccatccgccagctgccatg

SEQ ID NO: 1042 - DNA, 159 bp, Homo sapiens
  source 1..159: mol_type = other DNA
agccctttacactacggtgtttccggcttcaagatggtcgcctaagctgtttagtgaaacttcttccacctttctccattcctctaggtgctttttctgaacctggatgtgaggcattaaaggatccgacggaaatagaattgaaggcattctaaaatg

SEQ ID NO: 1043 - DNA, 187 bp, Homo sapiens
  source 1..187: mol_type = other DNA
cctcctccgtgtggggcagctgctggctgggctgcctgttgagtcagccttcttccctcacggctcttctcccggtccctgaaactcggctgccaggggagctggagccacctgcgaaggtgtcctcccatactggacccctacaggaagctccgtgtgcccagctggggcacagccccagctgatg

SEQ ID NO: 1044 - DNA, 367 bp, Homo sapiens
  source 1..367: mol_type = other DNA
gctccttttcctttttgatccattcaaaaattactcattgcaaattcccggactgctaggcgaggagagggaagggggcggaggagacagggctactgcaggcgcagagctgggggcagccgggggcccgagtggctgaggctggtcccgcagcggccgcttgccggcgttctggctcctgtggcctcaccaggaagcgtcagagtcccgacactggggaagctcggagcgccgcctccgctgccgccgcctcctgcctggctctgggtccccgagccccctcccctggcccagcccgactccctcctccttcccgaaccatccggctcgggctccttccctggcgatggctggccgctgagccatg

SEQ ID NO: 1045 - DNA, 114 bp, Homo sapiens
  source 1..114: mol_type = other DNA
ccgtctctgggcggctgctgccgctgccgctgctgctgctgcgggggtcgggcggcggccaggggatttgggcaggcaccgtggatccccgagaaggggacgagttgacagatg

SEQ ID NO: 1046 - DNA, 372 bp, Homo sapiens
  source 1..372: mol_type = other DNA
gagcctctgccagccctgagctgggaagaagcagctacctcggaggcagggcgcgcaggcgggcggcgatgagagggggcgcagccgcagccccgcgctggggagcccaccgctaaccctgcaccccacccacccctgcacaaaagagctggcgggcgctggccacgtcgccctgggtgaccttcctcggatgcagaatccgcccctgcgagcatcctcttcctcctaggctctgaaggcccggggagcgtgagcgatgcccagctgcacccgggcagggctcgcctttgtttgccagtaaggaggagaggctgtctcagctgcagaggggtcatccctgcttcaagccagtgcctcttcccagctcccatg

SEQ ID NO: 1047 - DNA, 189 bp, Homo sapiens
  source 1..189: mol_type = other DNA
attcctctctcacccccacgcagaggagagaacttgcttctggacccgggtgggtgccggctcggctctccttgtcttccagagcggtggcccggaagcacagtcctcccagacgccagcgccagaagctcggatcgcggctgcaccgggagagcgccgatctgggtgcgaggcaggtgcggggccatg

SEQ ID NO: 1048 - DNA, 257 bp, Homo sapiens
  source 1..257: mol_type = other DNA
gttcctctaggaaaattcctttgtgcagatcaggcccgtggattggtgagtgaatcctaaccacgtcttccctggcctgtcttcactcttctccccagaatcaccacttctgcactggtgtctgaaggtgtattgagtgattttgtggagggcagaagtaggaagtctttgggacaaaactgtatttaccttgggatctgtgaacaagaggaacctcagcagccaggacaggcaggagcagtggaatagctactatg

SEQ ID NO: 1049 - DNA, 20 bp, Homo sapiens
  source 1..20: mol_type = other DNA
cgccctctcgcgcggcgatg

SEQ ID NO: 1050 - DNA, 73 bp, Homo sapiens
  source 1..73: mol_type = other DNA
ctccctccctgcagcccgcaacgggaatggagtaaagggagacccgtcgacctggccacggggatcagcgatg

SEQ ID NO: 1051 - DNA, 260 bp, Homo sapiens
  source 1..260: mol_type = other DNA
cattcttccggtttcagaagttaaggctggtgtcctggccccagtccacctctgggagcgcctgcgccgctccgcggagagtccgtggatctcacagtgaaaaatgtttgctgacccttgacattgacaaactgctgacagctcagatgatccatgattggaaggatgtggtcatcaccaagatgtctttctttctccggttcccagttttccagacctgaagtgttttccaatcaaagcgaagagacgatctgtggatg

SEQ ID NO: 1052 - DNA, 370 bp, Homo sapiens
  source 1..370: mol_type = other DNA
ggctctcttgcgcaagcgcgctgtccgcttcttctgggcggacgctctggaggcaaaacatttccctgctgggggcggcgaccaccgtgagcgtcccggaaggggcggcaaagacgcctccgtcgcgcacgaggtggcctcgttggctttaccttggttcgcggtcgtccttggttatcgtgagcgtccgcgagtctctgggaggccaagcctaggggcgccacagcgcctgcgcgcgtacggcggccggaaggggctagaggcggctccctgggtgacaaccgcgcgccccacctttccccacgtggccgcgaagaccggctcaggagcatctatcggctgcacgccaacatcaacacaggcgaagatg

SEQ ID NO: 1053 - DNA, 36 bp, Homo sapiens
  source 1..36: mol_type = other DNA
gctcctcccccggcggcgagccagggagaaaggatg

SEQ ID NO: 1054 - DNA, 63 bp, Homo sapiens
  source 1..63: mol_type = other DNA
tgccctcttgtttttagtctcgcttttcggttgccgttgtcttttttccttgactcggaaatg

SEQ ID NO: 1055 - DNA, 126 bp, Homo sapiens
  source 1..126: mol_type = other DNA
ggctctcctaccttctcgggcagcccagtctttgccatccttgcccagccggtgtggtgcttgtgtgtcacagccttgtagccgggagtcgctgccgagtgggcgctcagttttcgggtcgtcatg

SEQ ID NO: 1056 - DNA, 563 bp, Homo sapiens
  source 1..563: mol_type = other DNA
ccgcctctgccccgcggcgagggtgtctatggagaggcggcggccgcggctgctgaggcggaggctgaggcagtggcgatggcgccctttcctgaagaagtggacgtcttcaccgccccacactggcggatgaagcagctggtggggctctactgcgacaagctttctaaaaccaatttttccaacaacaacgatttccgtgctcttctgcagtctttgtatgctactttcaaggagttcaaaatgcatgagcagattgaaaatgaatacattattggtttgcttcaacaacgcagccagaccatttataatgtacattctgacaataaactctccgagatgcttagcctctttgaaaagggactgaagaatgttaagcctactactgttgactggaagccttaccaataacataaaacaatcgaataacaattatttcatgtattatatgtaaaatatatatactggattcttacagtaagaatgaatatgaacagttaaattatgcaaaacaactgaaagagagattggaggcttttacaagagattttcttcctcacatg

SEQ ID NO: 1057 - DNA, 74 bp, Homo sapiens
  source 1..74: mol_type = other DNA
ctgcctccactcggcctcagttcctcatcactgttcctgtgctcacagtcatcaattatagaccccacaacatg

SEQ ID NO: 1058 - DNA, 55 bp, Homo sapiens
  source 1..55: mol_type = other DNA
tcgtctctctctctgcgcctgggtcgggtgggtgacgccgagagccagagagatg

SEQ ID NO: 1059 - DNA, 271 bp, Homo sapiens
  source 1..271: mol_type = other DNA
ccgcccctcccgatttcctccgggctacaggcgacagagctgagccaagcgtttactgggcagctgttacggtaagtgaggaggggctggggtgcccagcgttttggatctcccactctggcccggccccggaataccacatagaggccttgggacctgattcatcccgtccagacagccctagagacctgagcgactgaggcctgggatctggacgccggaatttcctgcgtggttctggacgccctgccctgggctcagattccaaatg

SEQ ID NO: 1060 - DNA, 238 bp, Homo sapiens
  source 1..238: mol_type = other DNA
cctcctcttgtagtggcgccggcttgcatcccaggtcgtggcggttttggtgcctgaagcagggagcgcggagtcgttcccgagagaggcggccaggctatgctcgccggtttccggcgttccgctccggccagccagagtctctgtctcaacctgtgtccgtgctccagcagtctcctcagcccggccccgcggcgcggttggcggcggcgccccaggcgcgccccctcctccgatg

SEQ ID NO: 1061 - DNA, 26 bp, Homo sapiens
  source 1..26: mol_type = other DNA
cgctctttcccggaggctggcagatg

SEQ ID NO: 1062 - DNA, 187 bp, Homo sapiens
  source 1..187: mol_type = other DNA
ctttccctttcggacatgcgcgctcggagcaaggcgccctcgcactcagcttaccgcgcatgtacgttgccaggggtaacgcaggtagccaaagtggcttgtggagtggcgaccgttagtgaggcggttgctgagacagacgctgaggcgggtaggaggagcccgagccgtaagggaagccgtgatg

SEQ ID NO: 1063 - DNA, 27 bp, Homo sapiens
  source 1..27: mol_type = other DNA
agttcttccggggcggaggtcaccatg

SEQ ID NO: 1064 - DNA, 582 bp, Homo sapiens
  source 1..582: mol_type = other DNA
ccgccccttcgcttataatgcagagcatgtgaagggagaccggctcggtctctctctctcccagtggactagaaggagcagagagttatgctgtttctcccattctttacagctcaccggatgtaaaagaactctggctagagaccctccaaggacagaggcacagccacacgggagtgaaatccacccctggacagtcagccgcaatactgatgaagctgagaagcagccacaatgcttcaaaaacactaaacgccaataatatggagacactaatcgaatgtcaatcagagggtgatatcaaggaacatcccctgttggcatcatgtgagagtgaagacagtatttgccagctcattggacattctcactattctatgccttaaaggcccttcaacggaagggatattcaggagagcagccaacgagaaagcccgtaaggagctgaaggaggagctcaactctggggatgcggtggatctggagaggctccccgtgcacctcctcgctgtggtctttaaggacttcctcagaagtatcccccggaagctactttcaagcgacctctttgaggagtggatg

SEQ ID NO: 1065 - DNA, 42 bp, Homo sapiens
  source 1..42: mol_type = other DNA
ggtcctccttggctgactcaccgccctggccgccgcaccatg

SEQ ID NO: 1066 - DNA, 122 bp, Homo sapiens
  source 1..122: mol_type = other DNA
ccccctccttcataaagtcctggcctcgggacagcctgcacagctgcctagcctgtggagacgggacagccctgtcccactcactctttcccctgccgctcctgccggcagctccaaccatg

SEQ ID NO: 1067 - DNA, 80 bp, Homo sapiens
  source 1..80: mol_type = other DNA
cgctctccccggatcgtgcggggcctgagcctctccgccggcgcaggctctgctcgcgccagctcgctcccgcagccatg

SEQ ID NO: 1068 - DNA, 164 bp, Homo sapiens
  source 1..164: mol_type = other DNA
gcccctctccccgggcagccgcggcggcagcagcagcagcagcagctggagctgtggggctgtcaccgccgcccgccccgctcactcgcggatcccgaccgcccatctccgcctcgcttccagcccaggatgagacttctgtgagcagcgaggattttgatatg

SEQ ID NO: 1069 - DNA, 244 bp, Homo sapiens
  source 1..244: mol_type = other DNA
cacccttctttgtgctcgggttaggaggagctaggctgccatcgggccggtgcagatacggggttgctcttttgctcataagaggggcttcgctggcagtctgaacggcaagcttgagtcaggacccttaattaagatcctcaattggctggagggcagatctcgcgagtagggcaacgcggtaaaaatattgcttcggtgggtgacgcggtacagctgcccaagggcgttcgtaacgggaatg

SEQ ID NO: 1070 - DNA, 336 bp, Homo sapiens
  source 1..336: mol_type = other DNA
tttcctcttgagccatcatgcacatctgactgcagccccagcgagcccttccttccttgtctgactgctcttcttctcgatttcttcttgttctgccttctcggtttgcagccctgacccccgctgtgtgtctggcccttggtgactgtccgtgtttctgttcctgtcattgtaactgtgacttttctctctgtctgcccccccttcctactggttcatgcttctcccccattcccaccctctctgcccggcctcccgctcccgccctttctcctcatgcacccggcctcgtctctgtagtctctgcacttgtctcccattaaggtcccatccatg

SEQ ID NO: 1071 - DNA, 303 bp, Homo sapiens
  source 1..303: mol_type = other DNA
cagtcttcctcccgccccttctttggtccctacggacctggggggcggtggcggtcaatgccgggtcaaggtccgcgggcctcgcagatcgtagcccgggcgcacgcgatcagatgatcctgttgtggacggctaagttgtaggcgggatggctgagaaagcggcgctaggacccccgggcagaggctcggggaagggagtcaggggggaaatgccttacaaggtcgccttgcggtcaccatcattgcccgccgcccaaaatagcccccggcgccagctggcctgccctatggccgagagatg

SEQ ID NO: 1072 - DNA, 81 bp, Homo sapiens
  source 1..81: mol_type = other DNA
ctccctctttccctccctcctcctccgtccgcccgtccgtccgcgcgtctgtccgttcggcccggtccggcccgaagcatg

SEQ ID NO: 1073 - DNA, 819 bp, Homo sapiens
  source 1..819: mol_type = other DNA
cagcctcccttatttagtccgcgatggcttccctcgcgccccaccgtcctcttccggaaggcggctccctccctgcgcagcccggagcccctgagatcagcctcgagcaggcgcccgagcgagactatccctaaacgggaacggcggtggccgactcgcgagtgaggaaaagaaggaaagggcagactggtcgcgaagagaagatccaggcctcagaggaggagaaaggccggagccagccgaggtttgccgagggcggtgttccggacccgcgcggtgcggggaggaaggccgagggtgggagaggaggggcccggcggaaactgccgaggtttcccgaaggcggcagcgtccgagttgcccggatgtagttggtggagcggcagcggcggcaccagcggcggcggcggcggcgggaggaggaggaggagaagaaggaccaggcggcggcagcagcggcggcggcggggggaggaggggaggaggcggcggagcaggaggaggagaaggcggaggaggcagtcgctctccgcggggctgagccggacgcgtcgtcttgcccccctccccccggttcgcggtgccgccgtgtagttggcgccgctgccccggctgagagtgagcgtggtgtcgacggagggagatggcccgggagcgccggcgccagtaactgggagctgatgagagtcgccgagggcgcgccgggcccaggtgccggggctgcccgccgcccgccgccgccgccgcctgcgcgcccgcccgcctttcgcggccgctctcccccctccccgacacacactcacaggccgggcattgatg

SEQ ID NO: 1074 - DNA, 19 bp, Homo sapiens
  source 1..19: mol_type = other DNA
cgctccttcagtctcgatg

SEQ ID NO: 1075 - DNA, 91 bp, Homo sapiens
  source 1..91: mol_type = other DNA
cagccttctgcactcacagccgaagggaaagcagcaggttggggcttcttgtggccaacttcagagcctgtcaccaggaaaggtaagcatg

SEQ ID NO: 1076 - DNA, 352 bp, Homo sapiens
  source 1..352: mol_type = other DNA
cgccctctagccccctcccgcgggagtcgcggcgctgcgggtaggagccgggttgcgggagaccccaggttcggttgggattcccagccagaacggagcttaagccgggcaggcgagcgaatgacggagtagcgagctgcacggcggcgtgctgcgctgttgaggacgctgtcccgcgcgctcccaggccgccccgaggcttggggtcttcgaaggataatcggcgcccggggccgaacagcgggggcacacggggcgctgccgaagtgcaaggccacggccagagctcgagcccgacgcgctgtctggagtcgtaggaccctgacgtggctgaagcggccccgggagcatg

SEQ ID NO: 1077 - DNA, 129 bp, Homo sapiens
  source 1..129: mol_type = other DNA
agccctccccgcggccggctcggctccttggcgctgcctggggtcctttccgcccggtccccgcttgccagcccccgctgctctgtgccctgtccggccaggcctggagccgacaccaccgccatcatg

SEQ ID NO: 1078 - DNA, 342 bp, Homo sapiens
  source 1..342: mol_type = other DNA
ctccctcttttctcagtaccctcctctttactctccgagttaactgagagccgacctgacatctccaacattttcaccctcttcccccacccccatcaccgagaatggagtcagggtttccggagagaccgaactctgctctcagcacctttcccagccgctgttgctaaactgacctcggaggacgagaggggaaggaggtgcgacgccccttacatcagtacataactaccacaccaaccacctccacttcaaagccggattttgcatcctgggggcgggacagacctcgtcccgggctgaattctctctccactcttcgagattggcacacccagaatg

SEQ ID NO: 1079 - DNA, 154 bp, Homo sapiens
  source 1..154: mol_type = other DNA
ctgtctttccttccctccctgctcggcggctccaccacagttgcaacctgcagaggcccggagaacacaaccctcccgagaagcccaggtccagagccaaacccgtcactgaccccccagcccaggcgcccagccactccccaccgctaccatg

SEQ ID NO: 1080 - DNA, 309 bp, Homo sapiens
  source 1..309: mol_type = other DNA
aggtctcttgactctttccgcctttgtttacaaccctgccatgatctccctcttgcaaaagcgagggctacagaacaggcattcaggagtcctgtgctccagtcacagccttttctgttcttcagctaggagacaccaaaccctcaggaagatttactatagctaagagaaaactgcagcagaaagggcgcggctacctacttcttaaattccgtttgtggaccctcagactcttagtcccctactcccagatacagcggccctaccgtggctcctggcaaggtggcatccacttttgtagtaagcatg

SEQ ID NO: 1081 - DNA, 50 bp, Homo sapiens
  source 1..50: mol_type = other DNA
ctgtccttctggcggagcgtgcttcccgctgcggggacgttcgagcaatg

SEQ ID NO: 1082 - DNA, 314 bp, Homo sapiens
  source 1..314: mol_type = other DNA
cgttctctggtagcgaccattttggttaatgttgggtgtgtttctgcggtttgtgaggtgagaggcgctggagctatgggtccgaaccgcggtgtctgaacccagaaggtgaagagtccttcttgctgcacagaggcagatcttaggccccgtaacggcgcccgccgctcccggcagtgctttccccgcgtactcgggatggcggcggccgcgctgaggctcccggctcaggcatcatctggctgcaaagaagagaacacactgtgtttgagggaggaggaaggaggatcagagtttaaactcctgccataatg

SEQ ID NO: 1083 - DNA, 97 bp, Homo sapiens
  source 1..97: mol_type = other DNA
gtttcttccgcttcctgtaccacccggctcaagtagcggacacggaacagggaactatcagcccgtcggcctccgggccctgcattctctagccatg

SEQ ID NO: 1084 - DNA, 88 bp, Homo sapiens
  source 1..88: mol_type = other DNA
agcccttttcgactgtgagctgcggcagctgagcagaggcggcggcgcgggacctgcagtcgccagggattccctccaggtgacgatg

SEQ ID NO: 1085 - DNA, 465 bp, Homo sapiens
  source 1..465: mol_type = other DNA
cccccttttcgtttccggcgctcccgccttctctccgcagagctcttctctgagcctgttggggggagggaggggggcgtggaggaactggggttcgcgggagcacgagctgcagcaccacttccgggtgagtgcaaggggagggcagcaaggagggggggccacccactacctcgcgcccccgccctgcgggtgtctcgcgcgcgttccgtgcgtgtgagtgtgtgggtctgtctcgctccagaagtgcgtgcccgcgcgctgcgccttgcgctttttcccctccctcgccccttcctggtcctcccaccctcctcggctccctcctttcccagcaaacgccgcccctcccgcgccctggctcaggctctggcgccgccgcagccgtcgccgcccgaaagttcaggagccctggaaaggagaaggaataagacggcaggaggaagagagagagagggtagaatg

SEQ ID NO: 1086 - DNA, 140 bp, Homo sapiens
  source 1..140: mol_type = other DNA
ctctcctttctcctccggcagccagcgcgcctgtgtcctctctaggaaggggtaggggaggggcgtctggagaggaccccccgcgaatgcccacgtgacgtgcagtccccctggggctgttccggcctgcggggaacatg

SEQ ID NO: 1087 - DNA, 90 bp, Homo sapiens
  source 1..90: mol_type = other DNA
gctcctcctcccgctcctcctcggcctccccttcgggcgctctcgcgctaactgtgctcctccggggccctccgcctgctcccagccatg

SEQ ID NO: 1088 - DNA, 161 bp, Homo sapiens
  source 1..161: mol_type = other DNA
gcgcctttatctgcatccgggtccgtgggattcgcgctccactggtcagctggggtcgctctcgggtggttgggtgttgcttgttcccgctgttccagcgtcgaagaaccattgggtctgccggtttgaacttgttctggaagctgtgcgtcaccgtaatg

SEQ ID NO: 1089 - DNA, 34 bp, Homo sapiens
  source 1..34: mol_type = other DNA
ccgcctcctccgcttgcggccggtctgcaccatg

SEQ ID NO: 1090 - DNA, 106 bp, Homo sapiens
  source 1..106: mol_type = other DNA
tttcctttccgctcccaggggcgttgggaacggttgtaggacgtggctctttattcgtgagttttccatttacctccgctgaacctagagcttcagacgccctatg

SEQ ID NO: 1091 - DNA, 100 bp, Homo sapiens
  source 1..100: mol_type = other DNA
ggaccttttcggccaccgctcgcttcaatatggctgcccccagggagagacgaggctaccatgaaggagccgagcgcagaccctgagtccgtcacccatg

SEQ ID NO: 1092 - DNA, 132 bp, Homo sapiens
  source 1..132: mol_type = other DNA
ctccctcctccttacccccccctccctgtccggtccgggttcgcttgcctcgtcagcgtccgcgtttttcccggccccccccaacccccccggacaggacccccttgagcttgtccctcagctgccaccatg

SEQ ID NO: 1093 - DNA, 215 bp, Homo sapiens
  source 1..215: mol_type = other DNA
cgccctctagtggcagccggttttgaggccggcctccggctttgaagttcctcaccgcgtctccttccctctccccaaagcctggatcaccgcccagcgtcaggcgaggggcgacgtctcgaggtaaaacggaggaggtgcgggacgcggagactgcgcgggcccggtagccctggagaggccgaggctctaggccgcgaggggcgggtgcaatg

SEQ ID NO: 1094 - DNA, 80 bp, Homo sapiens
  source 1..80: mol_type = other DNA
agttctctgcggagggccggttgatacagttccggtgggagaacgcggctgcgaggttttcggctttggctcctgatatg

SEQ ID NO: 1095 - DNA, 250 bp, Homo sapiens
  source 1..250: mol_type = other DNA
cacccttccccccgccaccgtgggttccagacttgggataagtaaacagcgggtggagcgaggcctacggacccaggccaggtgggagtctgcactcttcaaggggcctgggctgctgctcacgggtattaaagaactccgcgttgttcatggctgaggcgatgcattaggaagatcctggacctagagaacaagtcccccgaacgctgagttggaggcgggacttcgggtgcgcgttggcgggagcatg

SEQ ID NO: 1096 - DNA, 213 bp, Homo sapiens
  source 1..213: mol_type = other DNA
aagcctcttttcaggctgagtcctaaacctgaagaaagtttagagcctggggctctaaactacctgagtctttccaaacgacaagccaagaagacctgttgaaagtttcctcttaagtttcgtggagagagactcaggtatagaaatatccttactgccacctgacctgaagcagaagaaatcacagacagcttccagaccaggcccaacatg

SEQ ID NO: 1097 - DNA, 96 bp, Homo sapiens
  source 1..96: mol_type = other DNA
acgccccttctcctgtaaacttgggtcgcctctagcttagcgagcgctggagtttgaagagcgggcagtggctgcacacgccaaactttccctatg

SEQ ID NO: 1098 - DNA, 261 bp, Homo sapiens
  source 1..261: mol_type = other DNA
cttccttcccttccccgactttgcagatttctcttcccccaggcctccctcctccacctctccgccccctccgggcttggctctcccaggaggctacgactggagccactggtcccgcaggatccccgcgtcctcggtcgccgcgtccacgtccctctcgcgtccccgcccggcgccacgccgcctcctctgggttcggcctccgcgcggtgcagcgcagtctcaggccgcgggacaagcccgacttaaatctctgcaatg

SEQ ID NO: 1099 - DNA, 484 bp, Homo sapiens
  source 1..484: mol_type = other DNA
cgtccttctcccgcccccgcccctgcctgccagctccaccgggccgtaggtgcggacgacctcaaaattcctcggcccgcgaaggccgccagctgcggggaggggaggggaggcgcggtcccgcagcgcccccaggctcatgtcccaggtatgtccagacccccgaggcaccgcttgcagggcagtgacagcccgtgaggctcggcctcgacccctggcacccttggtcccagctacgccggctcctggccttcccccaagtccgagagagaggtgggattctccccgacgcagttggaaaccgggaatcccctttagggtcccgttcgtgctgcactactgactccaccatctgcaaagggattcttgtccagaatccccgaaggctttaggacagcgcttattttgttgaatgaagagtctctaattttcggaaagaccacaggctaaaagtcaagttgtgcctttttagccaagaagcatg

SEQ ID NO: 1100 - DNA, 82 bp, Homo sapiens
  source 1..82: mol_type = other DNA
cggcctttcggcagccgaacggccgcggcagttcaggacaaagaggtgtgggcaggccactgggccagctggtaacatcatg

SEQ ID NO: 1101 - DNA, 728 bp, Homo sapiens
  source 1..728: mol_type = other DNA
tgctcctttcggttgccatagcaaccccattccccaagccctctgtccgtctcctctggtaggttccacaatggtacaggcagcatcacgctgcacaatggtttccaggcagtgaaagagggtgattcagcaagccactcttcttctattttctttaacctccccttcactttttatttttatgggggtgggtggtgcttgctatatgcttacctttttcttttcttttttcatttttacaaatttccttttttgtcctcacccctcaattcctaggggcttgagtgagtttaagattgggttttcttggaaatcacctgtccatcgttaattttaaacaatctccatatctccaaagaatctcttccatgttagtctggaatgtggttaatgaaaaacaagtagggaggatttctggggcaaacactgccggatcaggatcgtagttctcaggcacggaatggctagtgtgagaaacaccaacagcaggcccatctcagatcttcactatggcaacttatgcaagaaactgttgaattagacccgtttcctatagatgagaaaccatacaagctgtggtatttatgagcctccatttcttatactactgcagtgaaccaacattggatgtgaaaattgccttttgtcaggtgtgtgttccttacaggtaaaacaagggattcgataaacaagtggatgtgtcatatattgccaaacattacaacatg

SEQ ID NO: 1102 - DNA, 143 bp, Homo sapiens
  source 1..143: mol_type = other DNA
cgtcctccccgccgccgccggtcccggtgcgcgcccatccctgcccgcagccccgcgcgccggccgagtcgctgagccgcggctgccggacgggacgggaccggctaggctgggcgcgccccccgggccccgccgtgggcatg

SEQ ID NO: 1103 - DNA, 170 bp, Homo sapiens
  source 1..170: mol_type = other DNA
acgccttttccgctagtcgccccgctctatcccatagtctcgctgccctgagcctcccgtgccggccggccggccgggggaacaggcgggcgctcggggggcgctcggggggcggggggagttccggttccggttctttgtgcggctgcatcggcggctccgggaagatg

SEQ ID NO: 1104 - DNA, 35 bp, Homo sapiens
  source 1..35: mol_type = other DNA
cgtcctcttgtgtagcctgaggcggcggtagcatg

SEQ ID NO: 1105 - DNA, 90 bp, Homo sapiens
  source 1..90: mol_type = other DNA
aggcctcttttgaaagatgcggccctgaccctgtgaacctcgcgcagagcggcctgaagcgagaggttgaggctgggaggtgagaaaatg

SEQ ID NO: 1106 - DNA, 102 bp, Homo sapiens
  source 1..102: mol_type = other DNA
gcccctctacggaggccccgcctctagttcggcctgttttctcagtcccggcacccgccgcgaccgcaaaggcggccgcggttctaggaacttgacgtgatg

SEQ ID NO: 1107 - DNA, 79 bp, Homo sapiens
  source 1..79: mol_type = other DNA
cttcccttactcaccggtgtccggaaaggtgaacgctgcgctcgggctgcctcgcctgttacctccgccgccgggcatg

SEQ ID NO: 1108 - DNA, 97 bp, Homo sapiens
  source 1..97: mol_type = other DNA
gctccttttcagctagtgggtggaaccccaggagggaaaactcagggaagcccagggcccgtgttgtgcttttggcccaggtaggtggacagacatg

SEQ ID NO: 1109 - DNA, 280 bp, Homo sapiens
  source 1..280: mol_type = other DNA
agttccttcagtctcagccgccaactccggaggcgcggtgctcggcccgggagcgcgagcgggaggagcagagacccgcagccgggagcccgagcgcgggcgatgcaggctccgcgagcggcacctgcggctcctctaagctacgaccgtcgtctccgcggcagcagcgcgggccccagcagcctcggcagccacagccgctgcagccggggcagcctccgctgctgtcgcctcctctgatgcgcttgccctctcccggccccgggactccgggagaatg

SEQ ID NO: 1110 - DNA, 396 bp, Homo sapiens
  source 1..396: mol_type = other DNA
cattctttcatactgcctcctcccttgtttttctgtctcagagagatagtctgtcctaaatatcccatgtagcccaggccactgaattaaaacggagcgtattcgttctctgccccaccccgcaactcctgaaagcggcgcaactcaattacttgatccttatatgccccacgcgggactcatactacgtttcccgtgaacacgtgcagtccaaaccccgcccctgatatttatctcagtggacggtggccggaaaaggacaatggtttccatgtcagcggataaacgctctcccctcggctcccggacgcgacggaggtcgtagtagtagtgagtacgtgctgaggagcaaaggagtaaccaagagatccagtgaccgacagagcaagagccatg

SEQ ID NO: 1111 - DNA, 132 bp, Homo sapiens
  source 1..132: mol_type = other DNA
tctcctcctttgcttcataaaaagagggacaagtggctggtgctgtggacagagaagctttatttttagtatgagacaacctctattttctttcaggagagggaagttggattatcaattcttttgtaaatg

SEQ ID NO: 1112 - DNA, 103 bp, Homo sapiens
  source 1..103: mol_type = other DNA
ccccccctttcccccttcgcctcctgacaggaaaggtttaagggggacagagccctgggaggccgggccgggctcgggggccaccccgggggcccgggccatg

SEQ ID NO: 1113 - DNA, 119 bp, Homo sapiens
  source 1..119: mol_type = other DNA
ggttctctgctctggacttgggaggctccgttgcctgctcccggagggagacgcgctgccgaggagaacccagcgggagaacatttcaggataggaataggccaagtgctgagaagatg

SEQ ID NO: 1114 - DNA, 225 bp, Homo sapiens
  source 1..225: mol_type = other DNA
ccatctcttccagcaggagagggctctactctgagctcctattttccaaggctccgggccgcgctcggcgctggcctgctgccccggcgggtccgccggccggaggcgggagtcacaggaagagccctccacaaaaggaggcctcggcggatcaggacagctgcaggtgggtgtgcagactggtgagctgccagcaggggcccagacgcgccaggcctggagatg

SEQ ID NO: 1115 - DNA, 105 bp, Homo sapiens
  source 1..105: mol_type = other DNA
cggtctctcagcggccggtttctgcgtccgctgccgcaggttccaccgcgctccaggtatttttttttctgaaggaaagctgcttcctcatatgtttcaagaatg

SEQ ID NO: 1116 - DNA, 271 bp, Homo sapiens
  source 1..271: mol_type = other DNA
cctccttttccgttgtcccttcgcgccccaaaccacatcctggagcgcactctccagcgtggctggcagcggggacggtgcgccggggcgcaggcccaagagtcgcgtgcgcggccccttgcaccatccccccgggcccacccccgggccgcgctgattgggcaggtagggactctgcccagcggaaagttttgggtgccgggaggaagtctaacctttgggagactccaagacagcagctccgaggtcggcgggggtctgggtggccatg

SEQ ID NO: 1117 - DNA, 252 bp, Homo sapiens
  source 1..252: mol_type = other DNA
acttcttttccgtgggagtaaggaagtgcttttgaatgaggtactgagggccaaggtgttggaagttcctaattctttcctcggttaactgtgaaactctgcgtattgggaaggcctggcctcagtcatcaggccaggagaggtactggacgccgcgcacgcactcgtctgccagcgaggcccaaaggggaagcctagcggagctcagtgtggcagctgctggcctctgggccgctacttgtcaataccatg

SEQ ID NO: 1118 - DNA, 638 bp, Homo sapiens
  source 1..638: mol_type = other DNA
ccgccttcctcctcctcctctcgccgctaccgccgtcgccgccgccgcagccgccgccggtccgcgcggcctcgggtggccggagctcagcctgcgcgcgccgcgccctgtgtctccgggtggggcagaagactcgccccttgaacctcccgcggggactctccgtggtgtggcggccctggggctctttcttaatagccccggactgagtcccctccagtcgaggaccctctcctagtccactgacgagcggtggacacctgccgctgtatctcccccaaaccgagtccttgccctgctgcctcctcatacccacacggcggcagagaccttcaccatagcgttcgctcaactccagaaccttccgacctccgctagttcctgcgggcctttgcccgcttcccggtgcaccctccccgggagacacctcagacccccgacagcctgggcaggctcggtgcctgcgggtgcgttcctgatcacccctcccctcttccctccccctcatcctccattcccttgttttcaccctctgtcctctgcccgtcactccccttgtcacctcttggagccccctcctaaccagcggccagtgggtttcccataccccaggatgtgagcctctttaacctgtaatg

SEQ ID NO: 1119 - DNA, 107 bp, Homo sapiens
  source 1..107: mol_type = other DNA
cactcttctttagcatgctattatggggaaagtgaccactcctgggagcgggggtggtcggggcggtttggtggcggggaagcggctgtaacttctacgtgaccatg

SEQ ID NO: 1120 - DNA, 90 bp, Homo sapiens
  source 1..90: mol_type = other DNA
cttcctctgctctgcttcccttcggaggaaaatttcaggctgaaggtttagcgggtgccgcctctaaagagagcaatcactacacttatg

SEQ ID NO: 1121 - DNA, 271 bp, Homo sapiens
  source 1..271: mol_type = other DNA
gctcctcttcctgccggcatccgggatccctacgtcccgcgtcccccgagcgctcggagcctacgcgcccagcgctaccgaaacccagagtcctgcgccctggagtccccgcgccccggagcccgagcacccgggagtcccgagcctcgcgccccggagtgcccgagcctgcgccgccgcacccggataccccgcgtccccgcgagctgccgaggccgcccgccgccgccccgcggacagtaccgccttcctcccctctgtccgcgccatg

SEQ ID NO: 1122 - DNA, 159 bp, Homo sapiens
  source 1..159: mol_type = other DNA
ctccctccctagctgacttgctccctcccgggctgcggctgctgcaaaagccagcagcggcagcgggagctgtccggaggccggcgtcgagggtttgccgctgtctctgctattccatcctccccataggggctctctcccctctcccatctcaagatg

SEQ ID NO: 1123 - DNA, 136 bp, Homo sapiens
  source 1..136: mol_type = other DNA
cggcctttgtctctcgctgcagtcagagctccaggtctggttcttctcctaaaggcccaggctgtgtggccccgtgtcctgcaggtattgggagatccacagctaagacaccgggacctcctggaagccaaaaatg

SEQ ID NO: 1124 - DNA, 31 bp, Homo sapiens
  source 1..31: mol_type = other DNA
cggtcttccgggcccgggtcggggctcgatg

SEQ ID NO: 1125 - DNA, 78 bp, Homo sapiens
  source 1..78: mol_type = other DNA
ggctctctgacgaaggactggaaggtggcggtggtgaaggtgcaggccgttggggcggctcagaggcaggtgactatg

SEQ ID NO: 1126 - DNA, 148 bp, Homo sapiens
  source 1..148: mol_type = other DNA
ctgcctctacccccgccacggatcgccgggtagtaggactgcgcggctccaggctgagggtcggtccggaggcgggtgggcgcgggtctcacccggattgtccgggtggcaccgttcccggccccaccgggcgccgcgagggatcatg

SEQ ID NO: 1127 - DNA, 93 bp, Homo sapiens
  source 1..93: mol_type = other DNA
ctttctctttgtcggaggagctcctctgtttcctgtgcagtagctcccgttgcggcggcacccgtggcagccctggcggacgcaggagcgatg

SEQ ID NO: 1128 - DNA, 248 bp, Homo sapiens
  source 1..248: mol_type = other DNA
ctgcctctcctcggccaggcggaacctctctgctgggcccggtggccgcaaaagaactttctttctcccgcccgaacggtcgccgcggccaactgcctcgcccgcctggcagcctaaccctccttctcttcttctcctctccggcttcgcgcggccctgcctccctctcgcccggcggcatccgcttgctgctgccaccgcctcctcatcttctgcccggccaaccggcctgccccgctgcagtgatg

SEQ ID NO: 1129 - DNA, 495 bp, Homo sapiens
  source 1..495: mol_type = other DNA
ccctcccttgcactgcctctggcacctggggcagccgcgcccgcggagttttccgcccggcgctgacggctgctgcgcccgcggctccccagtgccccgagtgccccgcgggccccgcgagcgggagtgggacccagcccctaggcagaacccaggcgccgcgcccgggacgcccgcggagagagccactcccgcccacgtcccatttcgcccctcgcgtccggagtccccgtggccagggattattggacctgcctggtttaaactattgtcttagttaattttgtgctgctctaacaaaatatcacagactgagtaatttataagcaatagtagcttatttggctcacagttctggaggctgagaagatcgtgaggctgcatctggcaagggccttcttgctgcttcataacatggcagaagacatcatgcgggtgtgtgtctggggaagagacttacagaagtggagttgctgagtcaaagatctaaccatg

SEQ ID NO: 1130 - DNA, 164 bp, Homo sapiens
  source 1..164: mol_type = other DNA
ttttctttctttcctctcccggcgttgatgagtgcttggctcctgacagaagggatttggctcccagctttgtagttcggaagaagttgggtctatagatttccccctaactctccattgatgtgttgagcttcagagggaataataactctacgtaaagcatg

SEQ ID NO: 1131 - DNA, 33 bp, Homo sapiens
  source 1..33: mol_type = other DNA
cttcctcttcgttaagtcggccttcccaacatg

SEQ ID NO: 1132 - DNA, 256 bp, Homo sapiens
  source 1..256: mol_type = other DNA
cgctctttttaagctcccctgagccggtgctgcgctcctctaattgggactccgagccggggctatttctggcgctggcgcggctccaagaaggcatccgcatttgctaccagcggcggccgcggcggagccaggccggtcctcagcgcccagcaccgccgctcccggcaacccggagcgcgcaccgcaggccggcggccgagctcgcgcatcccagccatcactcttccacctgctccttagagaagggaagatg

SEQ ID NO: 1133 - DNA, 173 bp, Homo sapiens
  source 1..173: mol_type = other DNA
cggcctttgcggttgatcggtcattggggtgctgcagccccgccacctgttccgtagcttgccggtgccccgaaggtgtcttctcctaaggaagattaaatcagaaaattttaaatcacagttatccctttacttaaagccagagtaagccttccaaattaaccccaggaatg

SEQ ID NO: 1134 - DNA, 485 bp, Homo sapiens
  source 1..485: mol_type = other DNA
ctttctcttctcttagcagcacccagcttgcccacccatgctcaagatgggcgggatgccagcctgttacataaatgtgccaaaagcctggccatgcctggaaaatggaccaatccgcccgccaagaggttgggtctcgttccctagagagaaggaagtttcctctccttgaagtgagagctagaatcgcactttctgtcaagctgagagaaagactcttttccagaggctaaaaggacaagaaaatctgatttgcttgcttctaactttgcgttttaaagggggaaggaggaaaggaaagagggggagggtggttctgcttagccccacccctccggctaccccaggtccagccgtccattccggtggaggcagaggcagtcctggggctctggggctcgggctttgtcaccgggacccgcaggagccagaaccactcggcgccgcctggtgcatgggaggggagccgggccaggaacaatatg

SEQ ID NO: 1135 - DNA, 79 bp, Homo sapiens
  source 1..79: mol_type = other DNA
ccgcctccccgcgggttccgttggctgtggcggcagctgacgcttgtggcggcggtggcttcggggtgggcgtaagatg

SEQ ID NO: 1136 - DNA, 115 bp, Homo sapiens
  source 1..115: mol_type = other DNA
tgttcttctacttacctgggcccggagaaggtggagggagacgagaagccgccgagagccgactaccctccgggcccagtctgtctgtccgtggtggatctaagaaactagaatg

SEQ ID NO: 1137 - DNA, 101 bp, Homo sapiens
  source 1..101: mol_type = other DNA
ggtccttcacgttccattcccaggctggtctgagctccggggccgtggtcccgctgcctcctccggtcgtcgtgcggaagctgcgacgcaggcagaccatg

SEQ ID NO: 1138 - DNA, 87 bp, Homo sapiens
  source 1..87: mol_type = other DNA
cattcttccggtggagatggctgcggccgtggcggggatgctgcgagggggtctcctgccccaggcgggctagagtgcagtggcatg

SEQ ID NO: 1139 - DNA, 94 bp, Homo sapiens
  source 1..94: mol_type = other DNA
acttctctgtagatcgctgagcgatactttcggcagcacctccttgattctcagttttgctggaggccgcaaccaggcccgcgccgccaccatg

SEQ ID NO: 1140 - DNA, 134 bp, Homo sapiens
  source 1..134: mol_type = other DNA
cggtctttctctagacgcgtcttgctgggagagtgtccgttgcttcccgtccgtgtcgcggccctgcggttggcggcctcctcgtggagcggagcaaggccaggcggcccctgctcgagtcccgcgtcgccatg

SEQ ID NO: 1141 - DNA, 301 bp, Homo sapiens
  source 1..301: mol_type = other DNA
gggccccctccgcgcgtactgcgggccccacgggtgttagtggcgggggcggcagagtccgggtgggttgtcgcgacggagccgggcctcttcgccgtcttgagacggggctggcgagaagggcccctcacggagttgccatgggcgtctaaccgcggcagccaggcccctctctacgtgagaccccggcccccctcccctttctgcagcccgcccgccacctgcgcgccgcgtggcctccgccggcgcctgcccgccccgcgcctccgtctcccacggagcaggccgggctctcgccatg

SEQ ID NO: 1142 - DNA, 204 bp, Homo sapiens
  source 1..204: mol_type = other DNA
ccatcttttccggcgctggctcctctccgtcagtgcggtttcgcctttatggtggtggagtctgcccaggctgtggaccgcaaataaccctgtacaaagaggaatggagattgcctctatccacctagattcataagctggcctgaggtgatcttggcatcaaggaagggatgcacatcatcacaccatcagcttcagagaatg

SEQ ID NO: 1143 - DNA, 117 bp, Homo sapiens
  source 1..117: mol_type = other DNA
ctttctcttcttttgcttctagttaccatcctcaaaggattggctaaaagcaagcaactggattgaacaccctaagaagaaagattcacactgcaccaggagacatcagaaagaatg

SEQ ID NO: 1144 - DNA, 134 bp, Homo sapiens
  source 1..134: mol_type = other DNA
gcgcctttcgattgcatcagctggtccagccgaggccaagtcccgggcgctagcccacctcccacccgcctcttggctcctctcctctaggccgtcgctttcgggttctctcatcgcttcgtcgttcgccaatg

SEQ ID NO: 1145 - DNA, 158 bp, Homo sapiens
  source 1..158: mol_type = other DNA
cagcctctgtgcggtgggaccaacggacggacggacggacgcgcgcacctaccgaggcgcgggcgctgcagaggctcccagcccaagcctgagcctgagcccgccccgaggtccccgccccgcccgcctggctctctcgccgcggagccgccaagatg

SEQ ID NO: 1146 - DNA, 174 bp, Homo sapiens
  source 1..174: mol_type = other DNA
cgtcctctcagtggtagcgcggggactggctgggaagcggtcggtcgagtgtggcctgtgtggactcgcatcttgcccgaagccgggcggaggagagctcaagctaagggtgatcagcccatgacctaaacctccagacaaaataaaacggaaaatttgctagaatcaagaatg

SEQ ID NO: 1147 - DNA, 112 bp, Homo sapiens
  source 1..112: mol_type = other DNA
tgaccttttcattcccgttgttatggaggtaggctctctaggaatctgggagtagtagctggggggcaagagcaaataaagagctcgagcttctgtggtctctggggagatg

SEQ ID NO: 1148 - DNA, 1859 bp, Homo sapiens
  source 1..1859: mol_type = other DNA
gggccttctggcagtttctgggagctgcgaacgcgccgccccggggctcggcggccggaaacgctggcttcggagccttaggcgccgcggcctttccttgttttccgcccagtccacgccgccatggccaagtggggccaggggaacccccactggatcgtggaggagcgggaggacgggaccaacgtgaacaactggcgctggcgcggctggcggcggcctccttccgggatctggggagggccgggccgcgggagccggggctgccctggggtctgtgcggggccgcggggccagggggtcagggggccgccccccctcagctgctggacgcagggctcggccttcgcctctcggctcgggagagtccttgagtacggagaccggctaggagggttgcagctgcctctttttgaaagttgggttgggccccaagagtgacttccgacagacctttccactcccaccgtctgtggcctgagggccttcccttctcctcccgcccacccctctggatgtttcggggagttagaagggagctggattgagagactgtgttaggggcgggggtatggaacgtagtggaaagggcagaaatttggatctcagttcgcgcccaccccgcaggcgcctcccgcgagccgggccctctgtgagtgagacaagctccccttcctttacgcgcctcacctggcgcgtggggagaggtcggcagccctccgccgcagaacctccggaagggatgtcctctgccctgcgcctctggccggggctgtggtccctccaggccgtcgaggggatgctgaggccggtccccagaggagcatgacttggctggtccggaggagctctgagggcatgggcaatcttggctcgctgcaacctcagcttccagagttcaagcgagtctcctgcttcagcctcatgagtagctgggactacagatgcgtgccactacgtccgtctgatgtttgtatttttagtagagacagggtttcaccatgttggtcaggctgctctcgaactccagatctcgtgatccgcccgcctgggcctactaaagtgctgggattacaggcgtgagctagatctgactttctagtgtcctagccttggcccgatggacatgtcatttctctcagctcgtttctgtcccctaaagtgagaatattgcctgggaagattacattagacgatgtatatgcgaagacacttgatagctggtattgtcatgattctgattagttcactactgctactttccctgtggcctaggctttgcctatttccagtgggcgagctagctagatcctcctcccttaaataagccagtgtttttaagacagaatactacttgcatagtggacaataatatcttaaagaactgagcaggatgaaaagaatttgatagaaagcaggtttgaggagcacattggaggttggcaggtttcgaggctgcttgagaggacttgggccgatctgggctgggcttggacgtgaccctggcacccaggcaggtggatcccagctggggcttccattcacgactttctggtccctggcaggacagagcgggatgccaccagcttgtccaaagggaagttccaggagctcctggtgggcatcgttgtggagaatgacgctggccgcggcgagatcaacgagttgaagcaggtggaaggggaggcttcgtgcagcagccgcaaaggaaagctgattttcttctatgagtggaacatcaaactgggctggaaaggcatcgttaaagaatctggagtgaagcacaagggattgattgaaatacccaatctttctgaggaaaatgaagtagatgacactgagaatttacaacgggaatg

SEQ ID NO: 1149 - DNA, 28 bp, Homo sapiens
  source 1..28: mol_type = other DNA
ctgcctctcagcccaaattggaaacatg

SEQ ID NO: 1150 - DNA, 115 bp, Homo sapiens
  source 1..115: mol_type = other DNA
ccgcccctttcatggccgccgcctggcgccggggctaagtggccgccggcgtccgggtacccgagggctctcccgcgttgctggcaccgctggcgccgcggtctcgtagcgcatg

SEQ ID NO: 1151 - DNA, 110 bp, Homo sapiens
  source 1..110: mol_type = other DNA
cctcctctggctgctgcctccgcagctccctcctcctaccccacctcctccatctggggagcgtctgcgggggcctgaggggcggcggcggcggcggcggctgcgatatg

SEQ ID NO: 1152 - DNA, 98 bp, Homo sapiens
  source 1..98: mol_type = other DNA
ccctcctttgcgctgggctgagcccagagccgagagcaggggtcggctctgagttccctgcttggtttttgggtggcagcagccagaggaggaatatg

SEQ ID NO: 1153 - DNA, 112 bp, Homo sapiens
  source 1..112: mol_type = other DNA
cacccttctctgtctacctctgggcgggactgccgggtgatgagatactcggtcggcgacggtagaacgggcgacggcgacaaccgcaatcacatccacgacggtgatcatg

SEQ ID NO: 1154 - DNA, 213 bp, Homo sapiens
  source 1..213: mol_type = other DNA
ggcccctttcggtccaacggcaggacctgggggctgtggccgggggcggccgttgacctggtgaccgcggcgccgccccagaccgggggcgcagtcccactcgctccgagccccggtcccccaagcctccctcccgggtacctggggccgcgcccgccctgcgcccagctccgccctccgtcggcccaggcctgacagagcccggcagccatg

SEQ ID NO: 1155 - DNA, 294 bp, Homo sapiens
  source 1..294: mol_type = other DNA
cttcctctctagccgccagtgctctatgctccgcggtcgcgggccgccagcctccagccggccagccgcgaggggtgcgcagagggaggcggggcggaaaggcgagaggtgtctcctccaccggagccaggggagacccgagcaagctccgtgacagcacgtcggccgccatgtcgccgagtggggctggaaacagacccggcgcccagcggtagccctccttgcgcctccgattcccagacatggaaggtctttaatgtaactttaaatggttcaccaaaggatgctctaatg

SEQ ID NO: 1156 - DNA, 154 bp, Homo sapiens
  source 1..154: mol_type = other DNA
gggcctttgtctctcgctgcagccggcgctccacgtctagtcttcactgctctgcgtcctgtgctgataaaggctcgccgctgtgaccctgttacctgcaagaacttggaggttcacagctaagacgccaggaccccctggaagcctagaaatg

SEQ ID NO: 1157 - DNA, 66 bp, Homo sapiens
  source 1..66: mol_type = other DNA
cccccttctctttcagcctcgggcacgggggaggctcggcggacctgctgattgggaaccgatatg

SEQ ID NO: 1158 - DNA, 137 bp, Homo sapiens; identical to SEQ ID NO: 689
  source 1..137: mol_type = other DNA

SEQ ID NO: 1159 - DNA, 437 bp, Homo sapiens
  source 1..437: mol_type = other DNA
acctccctcccctcccaggcgccgccgcagccggagcggctcccgggccctgggccgccgccggccaggaagaaatacttgtgttggctgcatttccagggatgctaccagagctcaaggctgtcacctggtcttgcccagaagagccgttcttagaggcaggacttgatgaaggctttcctgctgatggaataggtttgctagagctggccttggaattagaacccttcatgtggcctttataaatatgcgtttgagacagagttatatgcagaagttgaaaatgcctggaagatttctggtttctttcactacttatcctgcctttttgcatcgctgccagatttggatgatatgatattcagaggggcaccttaatcaaagccattcttcaacaagacccacctggcataagattgcacacataattcaagatg

SEQ ID NO: 1160 - DNA, 68 bp, Homo sapiens
  source 1..68: mol_type = other DNA
cctcctctgtggattctggccaggccgggttcggcggttgctgtgagagcgggcttcccaacaccatg

SEQ ID NO: 1161 - DNA, 595 bp, Homo sapiens
  source 1..595: mol_type = other DNA
aggcctctctgccgcgcgcgcaggtacggggcagaagtcgcaggtacccagctgctgcccacatttctggtccagagtcccgaaccccgagcactgggatgcctggctactccgagccaaggcactgatgtttgaactggaaacttcaaaacgtttaataagagtcttcaggatgggtttgaactagacaagctagaaatttctttagaacaccagctctagcatgcatctcccacttttggctttcctggagaggagcttgaagaggtggttctgcagacagccacagtgatacttaggaaaccagaggaatggatttgacttttctgctaggattctctgttatagtttctccctgagttgtaagaggcatggaaatatacatgaaactgaagaacctgcaaggaagggaagtggaactttccatgctgagtgaaaactaaccaagtggcagttgtgactgaaaacactgaaacctaccacgtccagattcactggattgggggatagaggaacggtcacagctagggagaaagaagtgataccggaaaagaaaacctaaatgaagagaatgaggatgactgcacagtagatg

SEQ ID NO: 1162 - DNA, 28 bp, Homo sapiens
  source 1..28: mol_type = other DNA
agctccttttcctgagcccgccgcgatg

SEQ ID NO: 1163 - DNA, 311 bp, Homo sapiens
  source 1..311: mol_type = other DNA
agttctcctgggcgcctagcattgtcgcccacgctgcagtagcggcttctgcggctccaagccagcgggtcctgtgaaggcgagcagacgcggagaaaggacgcgggagtgagagagggtgagtcagccactgtctaaacgataacgggaggcggctctgcggggtagggttgaattcagtaaatgggctcgtgctgctgtctcttcggagacgctgctatcttagcgtcagcgagggaaggttgaggaggagccagagccgggtcctgcagcgtttctcgccatcagcgcccgtcgccatctccaccatg

SEQ ID NO: 1164 - DNA, 127 bp, Homo sapiens
  source 1..127: mol_type = other DNA
ctttctttgactggagcggacccgccggacgcaaccgcctcgccagccggagccagcgcgagctcggcacggtggacacccggtccgaggccggcaagccggctggtgcccgagtcggccaagcatg

SEQ ID NO: 1165 - DNA, 137 bp, Homo sapiens
  source 1..137: mol_type = other DNA
ggtccccttatttggatctgcgggaatgtgggctggagaggtcctgccgtggtaccagcctccagcctgcccccaggactgcccctgacccaggcgcgcccgctgctcggtggcaggagggccggcggagcgccatg

SEQ ID NO: 1166 - DNA, 90 bp, Homo sapiens
  source 1..90: mol_type = other DNA
gattctctttgttccgcagccatttcaggccccggacaggaggcagtgccgcttcggccgaaggcccgagcgcccgaggcgtctgggatg

SEQ ID NO: 1167 - DNA, 43 bp, Homo sapiens
  source 1..43: mol_type = other DNA
cttccttcgttattggagccaggcctacaccccagcaaccatg

SEQ ID NO: 1168 - DNA, 329 bp, Homo sapiens
  source 1..329: mol_type = other DNA
ggctccttcctccaggagtctctggtgcagctggggtggaatctggccaggccctgcttaggcccccatcctggggtcaggaaatttggaggataaggcccttcagccccaaggacatcctggctgccatacctgctcctgacttctcagggctggcagtcatcgactgggaggcatggcgcccacgctgggccttcaactgggacaccaaggacatttaccggcagcgctcacgggcactggtacaggcacagcaccctgattggccagctcctcaggtggaggcagtagcccaggaccagttccagggagctgcacgggcctggatg

SEQ ID NO: 1169 - DNA, 182 bp, Homo sapiens
  source 1..182: mol_type = other DNA
agtcctcccggtcgccccactgcgcatggcacgttgcgtactcccctcccagcaaccggtctggcggcggcgcggcagtaaaactgaggaggcggagccaagacggtcggggctgcttgctaactccaggaacaggtttaagtttttgaaactgaagtaggcctacacagtaggaactcatg

SEQ ID NO: 1170 - DNA, 113 bp, Homo sapiens
  source 1..113: mol_type = other DNA
ccctctctttcgctgtttgagagtctctcggctcaaggaccgggaggtaagaggtttgggactgccccggcaactccagggtgtctggtccacgacctatcctaggcgccatg

SEQ ID NO: 1171 - DNA, 79 bp, Homo sapiens
  source 1..79: mol_type = other DNA
ggctctttccagctcctggcagccgggcacccgaaggaacgggtcgtgcaacgacgcagctggacctggcccagccatg

SEQ ID NO: 1172 - DNA, 115 bp, Homo sapiens
  source 1..115: mol_type = other DNA
cagtcttttctccttgctcagcttcaatgtgttccggagtggggacggggtggctgaacctcgcaggtggcagagaggctcccctggggctgtggggctctacgtggatccgatg

SEQ ID NO: 1173 - DNA, 145 bp, Homo sapiens
  source 1..145: mol_type = other DNA
atcccttcctctcttttctgttcgccctcttctccctgctctttttccctttccacccccctcctctgttctccctcacctcctgcgccccctcccccttcccgggttctgacagtacgatgagctgccccattacggcgggatg

SEQ ID NO: 1174 - DNA, 169 bp, Homo sapiens
  source 1..169: mol_type = other DNA
ttttcttttcgtttagatacattgccttttgcctaggctggcgtcgagacttgaggccgttgcagactttggcgcggctcgcgcctcctgcttcaagagcccagcggtgagagctggcctgcggcacgcggcctaatgccagacagtaacagtttggaggatcaagatg

SEQ ID NO: 1175 - DNA, 238 bp, Homo sapiens
  source 1..238: mol_type = other DNA
gagcctttgccccggcgtcggtgactcagtgttcgcgggagcgccgcacctacaccagccaacccagatcccgaggtccgacagcgcccggcccagatccccacgcctgccaggagcaagccgagagccagccggccggcgcactccgactccgagcagtctctgtccttcgacccgagccccgcgccctttccgggacccctgccccgcgggcagcgctgccaacctgccggccatg

SEQ ID NO: 1176 - DNA, 677 bp, Homo sapiens
  source 1..677: mol_type = other DNA
cgctctttctctcgccgcgccgtcttgaagccgcgcgggctcgtgagcagcgcgaggccgccaaggtgcctcgcttcgccggagccgctgccgcccgccggagggaagccggcctcgggcgcgcacgctcgtcggagccccggcgcgccccgcgcctgagcctgctgacagcggccgctgggctcaggctgtccgctctgggctccgcggcctcggccccgctgcactccacctccgccccctcggactccctcccctctgcttctactcctcctgctccagtgcggatcgtttcgcaactgcttgccactcgtcccgtgcctggctgtttttccatttcccggccccctcttcttgagtactttaccccctgcatttggggacagggactggaaaaggggcgggtggagcgtccagtggagaagaaggaagcgaggcccgcaggaggaggaggatcggcggactgtggggaggagaccccacgccaccctttctggtcatctcccctcccgccccgcccctgcgcacactccctcgcgggcgagctactttcggaccaggaaagtaagagcggccctgggtgacagcgccgcggggccagtcccggggttagccgcgcgtctgctcgcttctggtccgtcgcgctcccagccagggcacagcccggaccgaggatg

SEQ ID NO: 1177 - DNA, 95 bp, Homo sapiens
  source 1..95: mol_type = other DNA
ccgtctcctcctcttgctccctcggccgggcggcggtgactgtgcaccgacgtcggcgcgggctgcaccgccgcgtccgcccgcccgccagcatg

SEQ ID NO: 1178 - DNA, 796 bp, Homo sapiens
  source 1..796: mol_type = other DNA
ttttcttttcgccaggggttgggactccgggtggcaggcgcccgggggaatcccagctgactcgctcactgccttcgaagtccggcgccccccgggagggaactgggtggccgcaccctcccggctgcggtggctgtcgccccccaccctgcagccaggactcgatggagaatccattccaatatatggccatgtggctctttggagcaatgttccatcatgttccatgctgctgacgtcacatggagcacagaaatcaatgttagcagatagccagcccatacaagatcgttttcaactagtggccccactgtgtccggaattgatgggttcttggtctcactgacttcaagaatgaagccgcggaccctcgcggtgagtgttacagctcttaaggtggcgcatctggagtttgttccttctgatgttcggatgtgttcggagtttcttccttctggtgggttcgtggtctcgctggctcaggagtgaagctacagaccttcgcggaggcattgtggatggatggctgctggaaaccccttgccatagccagctcttcttcaatacttaaggatttaccgtggctttgagtaatgagaatttcgaaaccacatttgagaagtatttccatccagtgctacttgtgtttacttctaaacagtcattttctaactgaagctggcattcatgtcttcattttgggatgcagctaatatacccagttggcccaaagcacctaacctatagttatataatctgactctcagttcagttttactctactaatgccttcatg

SEQ ID NO: 1179 - DNA, 59 bp, Homo sapiens
  source 1..59: mol_type = other DNA
gtccctccttccctccccgactgtgcgccgcggctggctcgggttcccgggccgacatg

SEQ ID NO: 1180 - DNA, 309 bp, Homo sapiens
  source 1..309: mol_type = other DNA
cactctctttctctctccctctggcatgcatgctgctggtaggagacccccaagtcaacattgcttcagaaatcctttagcactcatttctcaggagaacttatggcttcagaatcacagctcggtttttaagatggacataacctgtacgaccttctgatgggctttcaactttgaactggatgtggacacttttctctcagatgacagaattactccaacttcccctttgcagttgcttcctttccttgaaggtagctgtatcttattttctttaaaaagctttttcttccaaagccacttgccatg

SEQ ID NO: 1181 - DNA, 173 bp, Homo sapiens
  source 1..173: mol_type = other DNA
agcccttttactcagccacagcctccggagccgttgcacacctacctgcccggccgacttacctgtacttgccgccgtcccggctcacctggcggtgcccgaggagtagtcgctggagtccgcgcctccctgggactgcaatgtgccgatcttagctgctgcctgagaggatg

SEQ ID NO: 1182 - DNA, 666 bp, Homo sapiens
  source 1..666: mol_type = other DNA
cttccttccttctccagtcccttccactgtgcgtcttctgtcccccgttcttccccagcggacccctctttcgagactccctagtggggtccccagctcccgggcgatcctgcccttgccgagcgcgttttctggagtcacctgggggaggggagtcctgggcagggccgggctggggaagacgcctggggcactgcccggcgttaacaaagggagccgataccgaccggcgtgggcgcggagcgggcggccgccaccgagcgtgctgagcaaccgcagcctccgcggccgagagtgcagcgagcaaggggagagccagttgcgcagagccctgcaaccagcagtccagggagaagtggtgaatgtcatggagcccagctgaaatggactggcccccttgagcctgtcccaagccctggtgccaggtgtccatccccgtgctgagatgagttttgatcatcctgagaaaaatgggccttggcctgcagacccaataaaccttccctcccatggataatagtgctaattcctgaggacctgaagggcctgccgcccctgggggattagccagaagcagatgatcatgacgcagtcctgaggtttaatggggcacccacagccaacttccaacaagatgtgggcacaaaaactaccattcgcctgatg

SEQ ID NO: 1183 - DNA, 60 bp, Homo sapiens
  source 1..60: mol_type = other DNA
ctccccttccgcgcccggctccccttccgcgcccctcccgccggagatgaggggaagatg

SEQ ID NO: 1184 - DNA, 37 bp, Homo sapiens
  source 1..37: mol_type = other DNA
gcttcttttgctgggctgctgctccttcggcatcatg

SEQ ID NO: 1185 - DNA, 420 bp, Homo sapiens
  source 1..420: mol_type = other DNA
cggtcttccgggtgtctttgacagggttttctacgccgctttttcggcgactttttgctcttccgctttttgccaccgcccccaaccttctatatccttgcagcccctaccttttcttgtgttgctcctcccctggcagccgtgaggggggttagatctcagccggagccggagctgggcctagctgtcccacgggccaccactacctcctttggttcgggagaaagctacgaccaagtacgcccagctcgggccttagaacttctgaacgggcagtgcgggtaggccctgcttagcccttcccggaggacacctgaccaaaagaggaagatagtcttgggacccttgcatggtgtttcaaagggtggtgaagaactaaggtagaagaatacatgttcacttccagtgaacaagagcatg

SEQ ID NO: 1186 - DNA, 120 bp, Homo sapiens
  source 1..120: mol_type = other DNA
ctcccttctggtgtactgggtgggaggtggaactagtcggacaaagccctcgcgtcggacccttgccagaactcaattaatggatgcctcgaagttgacgtacatatatattcagaaatg

SEQ ID NO: 1187 - DNA, 230 bp, Homo sapiens
  source 1..230: mol_type = other DNA
cgcccctttgcgcggctggcgcggccagccggccaggctcccctcggcaaacctgtctaattggggcggggagcggagcttcctcctctgagggccgtgccgcgctgccagatttgttcttccgcccctgcctccgcggctcggaggcgagcggaaggtgccccggggccgaggcccgtgacggggcgggcgggagccccggcagtccggggtcgccggcgagggccatg

SEQ ID NO: 1188 - DNA, 114 bp, Homo sapiens
  source 1..114: mol_type = other DNA
ctacctctacccacagccagtgcctttggcgcactgaggtgcacagggtcccttagccgggcgcagggcgcgcagcccaggctgagatccgcggcttccgtagaagtgagcatg

SEQ ID NO: 1189 - DNA, 162 bp, Homo sapiens
  source 1..162: mol_type = other DNA
cctcctctcgctctctgcccgctaactttcccgagccccgaccggcggcgcagagctccggggtagctttgtggccgaacgccgacctcgggcggagagcgcggctgtgcccagtatcccatccccgcgacccccgcgcgctccggagagaacaggactatg

SEQ ID NO: 1190 - DNA, 206 bp, Homo sapiens
  source 1..206: mol_type = other DNA
tcccctctgcctcccggtggctcctcgctctccttccatctctctcgccccctctccctccgtcccgtcctcgccgctcccctcaccccgcctctctccccctcccccagcccctcctctcctcaccccacccggcctccctccctccctcgcccgcccggcgctcgcagagccgacaccaggggggctctcgatgtagcaccatg

SEQ ID NO: 1191 - DNA, 119 bp, Homo sapiens
  source 1..119: mol_type = other DNA
ttcccttccttggatccctgtgcacctactggagccaggttactctgggtcctggacctgactgcctcattctggaggcttccagacagccacagttagtgcccaaacctgagaggatg

SEQ ID NO: 1192 - DNA, 52 bp, Homo sapiens
  source 1..52: mol_type = other DNA
cgccctctcttcctgcagcctgggaacttcagccggctggagccccaccatg

SEQ ID NO: 1193 - DNA, 248 bp, Homo sapiens
  source 1..248: mol_type = other DNA
cattctctttccttttccttctctcctgagcgctcctgcagttcctggggcgtagtaggggatccacaagcgtttgtgaccagtgaagttctttacaagggtgagatctgcacgggaggacccgagcgagggtctcggcttgccaggaagccggggttccccgggaagcgtggagttcacccgcgcactcgaagtgcctttgcaaaattatatctgggtgttggcacccagccactattctgccaatg

SEQ ID NO: 1194 - DNA, 89 bp, Homo sapiens
  source 1..89: mol_type = other DNA
agctcttttccttcttcctccacttcccctaccctccaccgtccgggagccgccgccaccgccgccgaggagtcaggaagttcaagatg

SEQ ID NO: 1195 - DNA, 693 bp, Homo sapiens
  source 1..693: mol_type = other DNA
gcgcctttgcggccgtgattcggtcccgctgtcctaggcgggatggtgccgctgtgccaggtaagggtggcgggtgtgcgtgcgggcctgggtgcggagccctcctcgacgtgtctctcccgccctttccctccacatacccagccttggtcagtcggacctccccactagcccccaacctggccggcgtcttgggttcgggggcgcccccgcccccgcccccgggcccttcctgtctccgggctttactgcgactgccccagcagaagtcgggtcctctccgagaactcttgtcagctcacggcagcaaggacggactcgttctgaaggcgcctccaccttttatgaccacctctttcccagattattcgttttgatgaagctaaaattttaatctaaaaagaaatgcacctcatggagaattcttgtgaagaactgtgcttcatctgtggatttctacacccttgatcatttgcaaacctgtaattatttcgtaaagagttgtttgcacggagtgacaggttgaagtattgtattttgcaaaaagtgctgaaataacaggagttcgttcagagaccatttctgtgcctcaagaaataaaagcgttgcagctgtggaaggagatagaaactcgacatcctggattggctgatgttagaaatcagataatatttgctgttcgtcaagaatatg

SEQ ID NO: 1196 - DNA, 24 bp, Homo sapiens
  source 1..24: mol_type = other DNA
tttcctttttccggaggggagatg

SEQ ID NO: 1197 - DNA, 45 bp, Homo sapiens
  source 1..45: mol_type = other DNA
ctgcccctcactcgtctcgcccgccagtctccctcccgcgcgatg

SEQ ID NO: 1198 - DNA, 512 bp, Homo sapiens
  source 1..512: mol_type = other DNA
agtccttcttgtcctggtcgttgttcccgtctgagtaccagctccccactgccctgagggcgggccggcctgcggcggagggaaaaaggaagaggagaaggaaattgtcccgaatccctgcagtgggtccaagcctctcccgggtggccagtctttctgtaggttgcggcacaacgccaggcaaaagaagaggaaggaatttaatcctaatcggtggaggtcgatttgagggtctgctgtagcaggtggctccgcttgaagcgagggaggaagtttcctccgatcagtagagattggaaagattgttgggagtggcacaccactagggaaaagaagaaggggcgaactgcttgtcttgaggaggtcaacccccagaatcagctcttgtggccttgaagtggctgaagacgatcaccctccacaggcttgagcccagtcccacagccttcctcccccagcctgagtgactactctattccttggtccctgctattgtcggggacgattgcatg

SEQ ID NO: 1199 - DNA, 518 bp, Homo sapiens
  source 1..518: mol_type = other DNA
cgtcctcctctgggtaccaactctattgcgcagctcgctgccgtgcgtttaacccaggcgaggaggaggaggagaaaattcccccagattcgggcaggcccgcaccccacattccgtcctgttttgagaggaggagggaagagaaataaacgtggcagcgcatagaaggccagcagggagactgctttccagacacctccggcccacacagccgttcaccccccgtcttttcagtcctggaaaaggaattcggtctgtccttaggatgaagctctaactgaactgaagtaaggagaaacagccttgaatctttggagggtctgtcttccttttgggctctgtgcaactgcagctacagtggaaaaaagcaaactgctcttgatcccaggccctgcctaagcctcagcagaacttgtaagcctaaactgaagagcctcacccggacgagcaggcatcccttaaccttaagcaatccagttccacgccctggatcagtgaataaccccagctgcaccatg

SEQ ID NO: 1200 - DNA, 537 bp, Homo sapiens
  source 1..537: mol_type = other DNA
cgccctctggggctccgagcccggcgggaccatgttcaccagcaccggctccagtgggctctgtgagtaccggcctccgccatcctggctgccccctacacgccaccctaggcacctctttgaggaggctggggcagcggggaccctcgggtttgccggaggtggtggggccgaccctccagacccgcgtccgaaccctgctagttcccggtcttgggggtcagcggaaaccgcccccatttcggcctggaggggcgaatggggacaaagccccgccgcccgccccgaccccacctggtatccccaggtgctctgcccaggagtctcttggggccgctgcaagtgggcaggtgccctggtgttctcgtgggccggccccaggccctttgcggagcgtgtgccgcgctgaaggaaggggccgtcccccttaccatgccccattcttttaggcttgggggaccgaactaactccccccgcccccacttgcaaagttcagcctccgctttagaagctgacctctcagtttcacttggatg

SEQ ID NO: 1201 - DNA, 119 bp, Homo sapiens
  source 1..119: mol_type = other DNA
cctcctccctcggccggccctggggccgtgtccgccgggcaactccagccgaggcctgggcttctgcctgcaggtgtctgcggcgaggcccctagggtacagcccgatttggccccatg

SEQ ID NO: 1202 - DNA, 181 bp, Homo sapiens
  source 1..181: mol_type = other DNA
cgctccctcacagctcccgtcccgttaccgcctcctggccggcctcgcgcctttcaccggcaccttgcgtcggtcgcgccgcggggcctgctcctgccgcgcgcacccccggggcttcggctccggcacgggtcgcgcccagctttcctgcacctgaggccgccggccagccgccgccatg

SEQ ID NO: 1203 - DNA, 130 bp, Homo sapiens
  source 1..130: mol_type = other DNA
ctttctttttaaaaatcgctgggtctgttgagctgtcctgggctgggtgccttgctctttgactgagactggagacagacggcaacagccacaggcagactgaggtggcaataggaaatctgccgagatg

SEQ ID NO: 1204 - DNA, 239 bp, Homo sapiens
  source 1..239: mol_type = other DNA
gattctcccgcctcccagccccggcgcacgcgcgccccgcccagcctgctttccctccgcgccctcccctctcctttctccctctcagaaccttcctgccgtcgcgtttgcacctcgctgctccagcctctggggcgcattccaaccttccagcctgcgacctgcggagaaaaaaaattacttattttcttgccccatacataccttgaggcgagcaaaaaaattaaattttaaccatg

SEQ ID NO: 1205 - DNA, 146 bp, Homo sapiens
  source 1..146: mol_type = other DNA
tttccttcttcccgcgagtcagaagcttcgcgagggcccagagaggcggtggggtgggcgaccctacgccagctccgggcgggagaaagcccaccctctcccgcgccccaggaaaccgccggcgttcggcgctgcgcagagccatg

SEQ ID NO: 1206 - DNA, 235 bp, Homo sapiens
  source 1..235: mol_type = other DNA
ttttctttctctcagcatctccacccaaccagcagaaaaccggtgagtggggcttttaagtgattttcaagaagaatgtaacagatgtcaaacgggaaaagcacaaggcaaagcctgctctctctgtctctctgtctcctcttctccttttttgccttattctatccgattttttccctaagcttctacctgggattttcctttggaaaagtctctgaggttccaccaaaatatg

SEQ ID NO: 1207 - DNA, 82 bp, Homo sapiens
  source 1..82: mol_type = other DNA
ttgtctttttttttttaaactaaaatggaggctggtttcttgccttaaggagcccattgcctttcccgctgaagtctagatg

SEQ ID NO: 1208 - DNA, 440 bp, Homo sapiens
  source 1..440: mol_type = other DNA
ccacctttccgggggaagccacgcgcaccaggcatcgcacgcggctctgcacccgcgccgccggacctgaaacccggcggagggcacacggggctgccgctgcgggccccggaccaacccatgcttactccggagcctgtaccggcgccgacgggtcggacctccctgcgcggtgtcgcccagcgggttcgtgcgaaaggcggggccgactacacgcggtgccgcgccctgagaccgtttatctgcagtcaacgcagcctcccggctcagcctgggaagatgcgcgaatcgggaaccccagagcgcggtggctagaccgggctccgccgcctcccccacagcccctttcctaatcgttcagacggagcctggtcgacttcgccggagactgccagatctcgttcctcttccctgtgtcatcttcttaattataaataatg

SEQ ID NO: 1209 - DNA, 257 bp, Homo sapiens
  source 1..257: mol_type = other DNA
caccctcttcgtcgcttcggccagtgtgtcgggctgggccctgacaagccacctgaggagaggctcggagccgggcccggaccccggcgattgccgcccgcttctctctagtctcacgaggggtttcccgcctcgcacccccacctctggacttgcctttccttctcttctccgcgtgtggagggagccagcgcttaggccggagcgagcctgggggccgcccgccgtgaagacatcgcggggaccgattcaccatg

SEQ ID NO: 1210 - DNA, 555 bp, Homo sapiens
  source 1..555: mol_type = other DNA
cctcctcttcctccccactctgcacatgcggctgggtggcagccagcggcctcagacagacccactggcgtctctctgctgagtgaccgtaagctcggcgtctggccctctgcctgcctctccctgagtgtggctgacagccacgcagctgtgtctgtctgtctgcggcccgtgcatccctgctgcggccgcctggtaccttccttgccgtctctttcctctgtctgctgctctgtgggacacctgcctggaggcccagctgcccgtcatcagagtgacaggtcttatgacagcctgattggtgactcgggctgggtgtggattctcaccccaggcctctgcctgctttctcagaccctcatctgtcacccccacgctgaacccagctgccacccccagaagcccatcagactgcccccagcacacggaatggatttctgagaaagaagccgaaacagaagatgaggcaatgaggctgcgagaggtagagtgattttccctcggtgactcaactgggacgtagcaggtcgggcagtcaagccaggtgaccccatg

SEQ ID NO: 1211 - DNA, 295 bp, Homo sapiens
  source 1..295: mol_type = other DNA
tggtctttccgggtccttgcacgcttcgctccaactcctgcagagctgagccggaggggaatccggaagggacacgctgaacaggtctgactcccgggcagcacagcccgctcacgattccggccacggtgatgacgagtctccgtcaacctcgtctggcacagctgggacctcctctgtgccagagctacctgggttttactttgaccctgaaaagaaacgctacttccgcttgctccctggacataacaactgcaaccccctgacgaaagagagcatccggcagaaggagatg

SEQ ID NO: 1212 - DNA, 138 bp, Homo sapiens
  source 1..138: mol_type = other DNA
ccgcctcttgtgaggcgcgcggagccgcctcccctgggtcaggtctgatgggccggtgggcgcgctagtggtggccgccaccgccgaaaccgtcgacctcctgggccccagttccgcgtccagccccgcggcagcatg

SEQ ID NO: 1213 - DNA, 47 bp, Homo sapiens
  source 1..47: mol_type = other DNA
ccccctctctatcagccgctcactccgtctcaatatgtctcaagatg

SEQ ID NO: 1214 - DNA, 173 bp, Homo sapiens
  source 1..173: mol_type = other DNA
ctcccttttcctccccactccttcccaccagcgccacagcaacatcctcagagtctgagcgaactgcgcccagcgcgggcacggagcctcccaccgccagcaacctgcggccccggagaaggcagcgagcgcagtgacagcgcctcaccgccaccagctcctggaccaccatg

SEQ ID NO: 1215 - DNA, 162 bp, Homo sapiens
  source 1..162: mol_type = other DNA
ctgccttctctcccggggccctgtgggcaagcctcctgcttcactttcaggtttctcgaagtgccttcttgctcctgtctgtttccccatcctgccagatttctgtttctcttgctgggcttttggcagtagggggctgtgttggtgggccctacgaagatg

SEQ ID NO: 1216 - DNA, 225 bp, Homo sapiens
  source 1..225: mol_type = other DNA
aggccttttccgcttctcttttacctccccaggtccgcccgtctgcgcccctcacaggaagccggagggtcgctctgatcccgaatctcccacaggcgtgaacctgctctgctgtgtatctttgcggggtggcctgcgctgaggcctgccgcgcgcggtgagtccgcgcagacctgaccctgcgtctcgcagctcggttgaggccgccgccgccttctcgggatg

SEQ ID NO: 1217 - DNA, 633 bp, Homo sapiens
  source 1..633: mol_type = other DNA
cttcctttaccttcctcccatggtctccttccggttctcgatgcttctctgagcctaagggtttccgccactcgttcaccctccccccagctcatgatcctcctccctcccccgccctcctggtccaatctccgatctgtttagtaagaaggtgctgttccgagaagaaggaaaagggcttgacacgtattcactcggccccggacgtgggaagcaagccgtctggcttcggcctcacatcggtcttgtgctcgggacggcggcgttggcggactgatccgcggcggtgaagagaggccgggaagttaaacttgtagccaccacctccgctcttcccgtcaccctcgcccccacttcgggccgaaagcacggtacagaggctgttggtggctttgccacgccaccccacccaccccggatcgcggctgtcttaagggacctggattcatcaggggctcttcggggcctgtgcgagtgctgatctgctccgtttttgcaaaaggcgcctgtgtctggcagagctggtgtgagacgagacaatcctgccccgccgccgggataatcaagagttttggccggacctttgagcatacaccgagagagtgaggagccagacgacaagcacacactatg

SEQ ID NO: 1218 - DNA, 169 bp, Homo sapiens
  source 1..169: mol_type = other DNA
tttcctctggctcctgcgagggcttggtttagggcttcagctctctgcgttctcggctccgggaggcctcggtgattcagccacagcctctgcctcccgttgctctgtgacctgagggtattggacaatttgtagctaagactcccggataccctgaagtcgggaaatg

SEQ ID NO: 1219 - DNA, 143 bp, Homo sapiens
  source 1..143: mol_type = other DNA
tgctctcttccaaggctgtaggagttctggagctgctggctggagaggagggtggacgaagctctctccagaaagacatcctgagaggacttggcagcctgcagatggcctattgtgggaccttgtgatcatgcctgaacatg

SEQ ID NO: 1220 - DNA, 190 bp, Homo sapiens
  source 1..190: mol_type = other DNA
tttccctttatagcaccattgaatcccagtcctaacagaagtactgcgaatcttgtggcctcattctgaacaaaagggattagagaagaaaaatctcttgatataaggcttgaaagcaagggcaggcaatcttggttgtgaatattttctgatttttccagaaatcaagcagaagattgagctgctgatg

SEQ ID NO: 1221 - DNA, 93 bp, Homo sapiens
  source 1..93: mol_type = other DNA
tgcccttcctcgccaccgggctgctctggtctcgtcggtcccctcctccgccccgtcgtcctgactctctctccctcctttcctcagaggatg

SEQ ID NO: 1222 - DNA, 378 bp, Homo sapiens
  source 1..378: mol_type = other DNA
aaccctttcacctcagttttcttcactccggcatttgcagcagagcgaaaggtggtcgagtcctgaaggagggcctgatgtcttcatcattctcaaattcttgtaagctctgcgtcgggtgaaaccagacaaagccgcgagcccagggatgggagcacgcgggggacggcctgccggcggggacgacagcattgcgcctgggtgcagcagtgtgcgtctcggggaagggaagatattttaaggcgtgtctgagcagacggggaggcttttccaaacccaggcagcttcgtggcgtgtgcggtttcgacccggtcacacaaagcttcagcatgtcatgtggcttatcaggagggcagacttcaaaagctactaaaaatg

SEQ ID NO: 1223 - DNA, 1104 bp, Homo sapiens
  source 1..1104: mol_type = other DNA
tgtccttccgcgcggcggccgcggagagagctgcggcccgggggggcgtgcctgggatccggagcttcgctcgggcccgggaaaggcggcagtgggctgggatcgcggtgtctctgggtgtgatggccaatggctggactggctcccgccctgggcggaggaatcccgagctgtgaagcggctggaatccgggcccatgtgcttctttgtttactaagagcggaagcgatggcgggagcgggggtggggtgcggtggcggggtgcggtggcggaggtcccggtgaaatcaggggctaaggggacccaaagaaggcgggggatcataggggtggaaagaaagctgagaaccttgagaccggagtgtgaggggccaacggggaagggcgctagaattttaaactaaagtagggaccggaattcccctggggagatgttggatggccctgtgcactgccacgggctctttattcttcgctggttagaaacagacttgtgaaaaagagttatgcccactttggggagacttcgaaaaggttaagaagttcttacaagagttctaccaggatgatgaactcgggaagaagcagttcaagtatgggaaccagttggttcggctggctcatcgggaacaggtggctctgtatgtggacctggacgacgtagccgaggatgaccccgagttggtggactcaatttgtgagaatgccaggcgctacgcgaagctctttgctgatgccgtacaagagctgctgcctcagtacaaggagagggaagtggtaaataaagatgtcctggacgtttacattgagcatcggctaatgatggagcagcggagtcgggaccctgggatggtccgaagcccccagaaccagtaccctgctgaactcatgcgcagattgtgagtggtctctgtcgggaaagatgtagggattggttctccaggatcttgtttgtgactgttttctccccttagtgagctgtattttcaaggccctagcagcaacaagcctcgtgtgatccgggaagtgcgggctgactctgtggggaagttggtaactgtgcgtggaatcgtcactcgtgtctctgaagtcaaacccaagatg

SEQ ID NO: 1224 - DNA, 135 bp, Homo sapiens
  source 1..135: mol_type = other DNA
tttccccctctccccctcctccgccgaccgagcagtgacttaagcaacggagcgcggtgaagctcatttttctccttcctcgcagccgcgccagggagctcgcggcgcgcggcccctgtcctccggcccgagatg

SEQ ID NO: 1225 - DNA, 463 bp, Homo sapiens
  source 1..463: mol_type = other DNA
ctttctttccctctccgttttggtgggctggttgaagatgaaatccactgaggagggaagtccagcaccctgtgtgccagtccagaactggcccatctgtagaccccctgaaaatcatatgggcttggatttggatattctcaacagaaagggttaaaggctgatggtacctaaagcctggtacttgaattttgatcaagataagctgccttaagttctcttcattacacaaatgatcctagataattgatagatcctgtggttcaactggatttctagatagaagctggattcatgtgatgccagaggagtaaaatttcaagagactgaaaccagatctgagtttcgctgttccagtctggacctctttggtgctgtaaatcctggatatactgtagatgagtactgcgtttttcttttatggcctctcttcagcttctggagacctcactatcctattatg

SEQ ID NO: 1226 - DNA, 453 bp, Homo sapiens
  source 1..453: mol_type = other DNA
ccgccttcgccgcggaccttcagctgccgcggtcgctccgagcggcgggccgcagagatgacatttattcattttatgcatcctgggttctactggtcgtcccacctcagttcctgtagcaaagagacttgagtctgagccactaattatcacccgtgaggtttcctccccgagcaggaagcagcaggccagagctgcgctctctcagtgcactctccaaccaagcatcagtcaccactcccggtccagcccctgtggccaagagctggcgtgcaggctgcgggaggcagctggctgtgcaagaccctggcagggccctcgcctcctgagaaaccgagagtcagaaccaaagccaggctgtcctggttggagactgagccagaaagggtggctcacctcacggtgaggctgtcgagtgacctgagagcctcagaccctcacgtcagccggatg

SEQ ID NO: 1227 - DNA, 169 bp, Homo sapiens
  source 1..169: mol_type = other DNA
tgttcttccgggttggaggcgcagcgccgcggggcccaagcccgggtctgccagcgcgacgtcctctcgcggccctcagggcacagcccaaggctgtcagcctcccggcccagtgatttgccttcaaggaaactggggagtcagaaaattgggaactcatatcaacatg

SEQ ID NO: 1228 - DNA, 149 bp, Homo sapiens
  source 1..149: mol_type = other DNA
gtccctctccctccccaggacttctgtgactcctgggccacagaggtccaaccaggctaagggcctggggataccccctgcctggcccccttgcccaaactggcaggggggccaggctgggcagcagcccctctttcacctcaactatg

SEQ ID NO: 1229 - DNA, 52 bp, Homo sapiens
  source 1..52: mol_type = other DNA
cggcccttccagaccgtctctcctcagggttggagacttcggggccaagatg

SEQ ID NO: 1230 - DNA, 771 bp, Homo sapiens
  source 1..771: mol_type = other DNA
tcgcctctttagtaggtcgggtgagtgtagtgtgcagggaagagacgcgtcagcgccagggccaggcccgcccgggggcagcccggcagccgaatcttgggctactctgtcccaacagccggagcagatcagaccgaccggccctgcccgctcggtcccgcgccctccagaccctacggtctccgtttctaggggcacatggttagcggcaggcgcccacagccaatccactttgccagcctgccccttcctctgccaagagcagcttcttcagccgcgctccagttccgcagacgcctgccccaccctgctcttcccttccagggaagacggatcacgcggccaagaacgagactcgcaaactgggcatttctccgagccgggctagagcaagtagcgagactccgcgtgagagtgggaaagagccttaacaggcaaccatgttgcccagtgggttttctgtgcctttgggtgcggaccaatgaggcgcgtggggcgggacttccgcttcgcctaggtgttgtcgtccctgctagtactccgggctgtgggggtcggtgcggatattcagtcatgaaatcagggtagggacttctcccgcagcgacgcggctggcaagactgtttgtgttgcgggggccggacttcaagagagaaagagagagtgggcagacatcgaagccaaacagcagtatcccggaagcactcatgcaactttggtggcggccactcagttttctctgccagtgtctggtgattttacaacgagatg

SEQ ID NO: 1231 - DNA, 190 bp, Homo sapiens
  source 1..190: mol_type = other DNA
ccgcctcctgcgccgccccttccgaggctaaatcggctgcgttcctctcggaacgcgccgcagaaggggtcctggtgacgagtcccgcgttctctccttgaatccactcgccagcccgccgccctctgccgccgcaccctgcacacccgcccctctcctgtgccaggaacttgctactaccagcaccatg

SEQ ID NO: 1232 - DNA, 208 bp, Homo sapiens
  source 1..208: mol_type = other DNA
cgctccttccctgagctcccgggctccggcagcgcgctggcggggcgccgcattgcacactctgggggcgccgcagtgttcgtgggatggggcagcgggctgcagctggcggccggaatccgcgcgcagcccgggtgcaagttctctcctgttgccctgagtgcccactcccaggccctctgtatgagtgacacttcagtctgccatg

SEQ ID NO: 1233 - DNA, 314 bp, Homo sapiens
  source 1..314: mol_type = other DNA
cagtctctgctttctttttcctttcttccagaaggagatttaaccatagtagaaagaatggagaactattaactgcctttcttctgtgggctgtgattttcagaggggaatgctaagaggtgattttcaatgttgggactcaaaggtgaagacactgaaggacagaatttttggcagaggaaagatcttcttcggtcaccatacttgagttagctctagggaagtggaggtttccatttggaattctatagcttcttccaggtcatagtgtctgccccccaccttccagtatctcctgatatgcagcatgaatg

SEQ ID NO: 1234 - DNA, 65 bp, Homo sapiens
  source 1..65: mol_type = other DNA
ctgtcctttcccgggagttagcgatccctcaacccctgcactgcgctagtcctaaagaggaaatg

SEQ ID NO: 1235 - DNA, 91 bp, Homo sapiens
  source 1..91: mol_type = other DNA
gattctcttttgtccacagacagtcatctcaggagcagaaagaaaagagctcccaaatgctatatctattcaggggctctcaagaacaatg

SEQ ID NO: 1236 - DNA, 81 bp, Homo sapiens
  source 1..81: mol_type = other DNA
actccttttctcctaaccgtcccggccaccgctgcctcagcctctgcctcccagcctctttctgagggaaaggacaagatg

SEQ ID NO: 1237 - DNA, 510 bp, Homo sapiens
  source 1..510: mol_type = other DNA
aagcctttctccattttgcggtctaggaagtagcagaggccccttcctgtagggagttgccatggagacgcggtggggcaccgacggagttctaatgacggccgtgattggtgcaggatcctgctaatctcaggaaggcccgtagagaagtgaggaaaacgtggtggggggcatgcgcgatctggtaggcggtgctgccgtctgttgtacctgagaggcttgcgcatgccgacgcacggattcgaggcggggagcatgggaagaagcggccaggagtatgacctgatcattgcgaccaccgctaggggaagggaggagagggtgtagaaacggggacgagggtgggggaagggcaaggaggcgctcgagctggtgcgcggagcatcctgggagacgtagtccagcgggagggggaagtcgaagactgcgcgtgctcaggagcgcggagcggcccgctgagcgcagaggggcagacactggcctcagatacctgacctggtaccctctatg

SEQ ID NO: 1238 - DNA, 228 bp, Homo sapiens
  source 1..228: mol_type = other DNA
cctcctctttttccgtctgcgtcgggagctcccgggcacgtgaggccgtgccgcgtttactggcgggcgggacggcctagccgggcggcgcctcggaggaagccgcggaccccttaggtgctgggcccttggaaatcggcgcgtggggggcggtgctcgagctgagcgcgagagggcgggagagctcgtggggtgcgaggggagcaggacgcccggccgggcagcatg

SEQ ID NO: 1239 - DNA, 327 bp, Homo sapiens
  source 1..327: mol_type = other DNA
cttcctctttcaacaacaaatgtgtcagttatcagcaggatccatgccgccagagtaaagctttctaccctttactccctgcaaagaaacaagagtgcttatcccagctaagctccagggtaatgttatcatgacagcttcaacttttagaccacaggcaaatgctttgttaaaactctatgctggtcattcccttcaggatttggcactcaccaacatacccttctttcaagtgaaaaggcatctcttttaatggtcctgacctttggaataggaagcatgtaccctggacagagcacttcaaactagaggaaccataaatccatg

SEQ ID NO: 1240 - DNA, 48 bp, Homo sapiens
  source 1..48: mol_type = other DNA
catccttttgcctgctcccggcgaggggtggctttgatttcggcgatg

SEQ ID NO: 1241 - DNA, 26 bp, Homo sapiens
  source 1..26: mol_type = other DNA
cgtcccctttccggccggtccccatg

SEQ ID NO: 1242 - DNA, 305 bp, Homo sapiens
  source 1..305: mol_type = other DNA
ccctcccctccgcccgtcaccgcctccttgaagctgccgctgtcgctgctgctcgttcgagtcgcagatccttgccagcacattacagaatatttttgttgaaccttcttgagaattcagagaaactgctgagtgaccactgaacgaaaagatctaatcttaaggcttacgcctcactttgatgcccaggctggagtgctgtggctcaatcacagctcatcgcaacctcgacctcccgggctcaagtgatcctctcacctcagcgtcccgaacaggcgtgttccatccaccacatcagaacaatg

SEQ ID NO: 1243 - DNA, 414 bp, Homo sapiens
  source 1..414: mol_type = other DNA
tcctctctccacttcctgctactgcaggcctctcctccgagaacagaggccaggtcatgactcactggcttcctgcaacctgacgatggcccagccagaagacaaggcacctgaagtccccacagagggggtgaggtgaacaaagcagacaggacccctctaggggtcctcagcaccctagagccacttactcgcctgcagaggacatggggggtgtggcatgtgccagagctggatacccaggatgcggaggcccttgtggggctgtggccactagggagtttcttggtcacaggacgtgaccccagccaggccctggtgttgaggtcaggacctttaccaggagaagtcaatacctaccagatccagaagattcccagaggtgtgtccctggaatcctccaacctctgcatg

SEQ ID NO: 1244 - DNA, 144 bp, Homo sapiens
  source 1..144: mol_type = other DNA
ccgccttttcttcagcgtcctacccgcggcactggctgcgagcgccgggccacctgcgagtgtgcgcagggactctggacacccgcggcggcgagctgagggagcagtctccacgaggacccaggcggaccctctggcgccatg

SEQ ID NO: 1245 - DNA, 313 bp, Homo sapiens
  source 1..313: mol_type = other DNA
ccgcctttccggagcgcgggcgcgcggtggcgggaatttcgcctgtttgcggtttagaccccaaagattcctgttggtggtctgggtcacaggaggcaggtttcgggagctggaaatgtgagcgggtacgacaggcaccgcgggtaaccgacgccccgggtccttgctgcagccgggtacgcgggataccggcaccccgccttctccgcccgagtgctgccaggcgtgggcctggaatctcttcacaccttctctttggagcccttaatgatacgacgaaccccaagtgtttcagaacatgaagtaaacaatg

SEQ ID NO: 1246 - DNA, 367 bp, Homo sapiens
  source 1..367: mol_type = other DNA
actcctttcctttttccagtggttatcgcggcgcccaccggcctctgatctctgagtcttctccaacccacagacgttttttgttgctctggttccaggaccttctccacaactaggccattttccctgccaggtgtcctttttgacctcttgacctctgactcaaagggcctgctccccctcatgtcttcggcctggagaagagccagctcctgaaggaggcctttgataaggccggcccggtccccaagggcagagaagatgtgaagaggcttctgaaactacacaaggaccggttccgaggtgacctgcggtggatcctcttctgtgcagacctgccgtccctcatccaagaaggccctcaatg

SEQ ID NO: 1247 - DNA, 384 bp, Homo sapiens
  source 1..384: mol_type = other DNA
cgcccttccggctcggcctttagttagtgaccagctcctcggcgttctgcagagcgtgggtttcagcgagttctacgtgccaggtccgcccggtgccggcttcctcgctgcccctggcggctcgtcagcccccactacccctgaacttggtcccaatggcggcccgcccctccttcacccggaccgtgggcatctgggcctcgccgaagccgtcaaggtggctgctcgggcttctagagcccgtgtccagccctttgccaccgaggcctgatcctcttttctgccctaaagaacttgccctgacagcctctggctcccgctcttgaggatcttgcttgtccaaacccagaagacagtgcatgaagccaggggacatccgccatg

SEQ ID NO: 1248 - DNA, 14 bp, Homo sapiens
  source 1..14: mol_type = other DNA
ccgccttctccatg

SEQ ID NO: 1249 - DNA, 143 bp, Homo sapiens
  source 1..143: mol_type = other DNA
ccgcccttttcttcgtagcctccaagggagctggaacaaaaaacgaaaccaaaacctgcctgctcgctcctctccccatcgcctgcgttccgctggttgtgggctttctgcggccgctgagggcgcgtctcccctccgccatg

SEQ ID NO: 1250 - DNA, 97 bp, Homo sapiens
  source 1..97: mol_type = other DNA
caccctccttcagcccaggcaaggcctggggccctgggcagcctccaggtgcagtgccctcccgtgggccgcacccttgccactgccccagggcatg

SEQ ID NO: 1251 - DNA, 31 bp, Homo sapiens
  source 1..31: mol_type = other DNA
ctttctcttccttccaccccgagggaccatg

SEQ ID NO: 1252 - DNA, 91 bp, Homo sapiens
  source 1..91: mol_type = other DNA
cgctctccgcctcggcagtgccagccgccagtggtcgcacttggagggtctcgccgccagtggaaggagccaccgcccccgcccgaccatg

SEQ ID NO: 1253 - DNA, 117 bp, Homo sapiens
  source 1..117: mol_type = other DNA
atttcctttcccttttttcgctcgtgtcccgccgggtggcgctcaccacctccccggaacacgcgagtctcctgtcgcggttccggtcggaattaccccgtggagcacgccgatatg

SEQ ID NO: 1254 - DNA, 63 bp, Homo sapiens
  source 1..63: mol_type = other DNA
gagtctttccttagtaacctgggcgatagctgtggatgtttccaaggattgtcttcagtcatg

SEQ ID NO: 1255 - DNA, 211 bp, Homo sapiens
  source 1..211: mol_type = other DNA
cttcctccataacaagccaaacgccagaccgagagtgcctccgtgcgcgagtgcccggtgtgtgcgcgccggcgagagcaggggcccgcccggctccccgcccgccgcggcccgaactcatgcagctccgagcgagcgagcggcgcccagcccagcgcctcggccgaacccctccgcagcaggctgcctgctgtttcccggggagatcatg

SEQ ID NO: 1256 - DNA, 49 bp, Homo sapiens
  source 1..49: mol_type = other DNA
cctccttttcgccctcccacccgcactgcagtctccagcctgagccatg

SEQ ID NO: 1257 - DNA, 164 bp, Homo sapiens
  source 1..164: mol_type = other DNA
aagcccttttcattgcaggagaagaggacaaagatactcagagagaaaaagtaaaagaccgaagaaggaggctggagagaccaggatccttccagctgaacaaagtcagccacaaagcagactagccagccggctacaattggagtcagagtcccaaagacatg

SEQ ID NO: 1258 - DNA, 832 bp, Homo sapiens
  source 1..832: mol_type = other DNA
cagccttctcactcctcactgagtccactctgaacgtgctaaaatgggaaggaggcggtgttttgctgatctgttaaattcttagtgaagtttccttgatttccagtggctgctgttgtttgagtttggtttggagcaaaactgaggtagtcctaacatttctgggactgaatccaggcaagagaaagaagaaaaagaagaagaaaaagaggaggaaaaaggtagggagaaataaagggaggagagaagcacagtgaaagaaaaaaaaagtcccttttcgacatcacattcctgtgttttccctcagcctggaaaacatattaatcccagtgcttttacgcccggaaacaaagagactaagccagactatgggggaaagggagataagaaggatcctggaactttaaagagggaaagagtgagattcagaaatcgccaggactggactttaagggacgtcctgtgtcagcacaagggactggcacacacagacacacgagaccgaggagaaactgcagacaaatggagatacaaagacttagaaggacagctcctttcacctcatcctacttgtccagaaggtaaaaagacacagccagaaagaaaaggcatcggctcagctctcagatcaggacaggctgtggatctgtggcggtactctgaaagctggagctgcagcacaccccttttgtattgctcaccctcggtaaagagagagagggctgggaggaaaagtagttcatctaggaaactgtcctgggaaccaaacttctgatttcttttgcaaccctctgcattccatctctatgagccaccattggattacacaatg

SEQ ID NO: 1259 - DNA, 114 bp, Homo sapiens
  source 1..114: mol_type = other DNA
cgacctctttgcgcctgcgccccccttgccagtctttcgccggcaaaaggaggacgtagaaaaggggacaccggaaactcactcttcacccggaaatggttattgaggaacatg

SEQ ID NO: 1260 - DNA, 16 bp, Homo sapiens
  source 1..16: mol_type = other DNA
cgcccttctcaagatg

SEQ ID NO: 1261 - DNA, 440 bp, Homo sapiens
  source 1..440: mol_type = other DNA
ctttccctgtgctgcccctgccgcgcgatggagaagagctcgagctgcgagagtcttggctcccagccggcggcggctcggccgcccagcgtggactccttgtccagttaatgtgttaagagccattgacatttgaagatcatcagaagtgaagataaaacatctcaaaaattataattgcctccacttctcattcagagaattcagtgcatacaaaatcagcttctgttgtatcatcagattccatttcaacttctgccgacaacttttctcctgatttgaggagggagtctcgctctatcccctaggctggagtgcattggcgccatctcggctcatttgcaacctctgtctcccgggttcaagcgattctcctgcctcagcttcccgaggagctgggattacaggtcctgagggagtctaacaagttagcagaaatg

SEQ ID NO: 1262 - DNA, 171 bp, Homo sapiens
  source 1..171: mol_type = other DNA
cgccctctagctgcgctcggctgagtcagtcagtctgtcggagtctgtcctcggagcaggcggagtaaagggacttgagcgagccagttgccggattattctatttcccctccctctctcccgccccgtatctcttttcacccttctcccaccctcgctcgcgtagccatg

SEQ ID NO: 1263 - DNA, 347 bp, Homo sapiens
  source 1..347: mol_type = other DNA
gtccctccctctccgcactagctgtctgccctgccctgccgtaggagatgggctgggagcctcccacgctctccagctcactcggcaggcagcggggaccagggctggcaggttaagcctctgggggtggatcctgaaaggtggtccagccgcctggccctgcgtgggaccctccacctggcagcagacagggtctcgctctgtcacacaggctggagtgcagtggtgtgatcttggctcatcgtaacctccacctcccgggttcaagtgattctcatgcctcagcctcccgagtagctgggattacaggtggtgacttccaagagtgactccgtcggaggaaaatg

SEQ ID NO: 1264 - DNA, 240 bp, Homo sapiens
  source 1..240: mol_type = other DNA
gctcctccctgccgcctcctctcagtggatggttccaggcaccctgtctggggcagggagggcacaggcctgcacatcgaaggtggggtgggaccaggctgcccctcgccccagcatccaagtcctcccttgggcgcccgtggccctgcagactctcagggctaaggtcctctgttgctttttggttccaccttagaagaggctccgcttgactaagagtagcttgaaggaggcaccatg

SEQ ID NO: 1265 - DNA, 405 bp, Homo sapiens
  source 1..405: mol_type = other DNA
atttcttttccccattttaaatgcaaagcaagacttgtgaatcatagtgtctctgctcctgggattcagaccaaatttccccccaaaattctcaggctatttgtttgaatacctgcttacagtggtacacaatgggcagctttgagaagaaaaattgataatcttcacggaagagtaatttgaatgaaattacacttgacagcctgtctccaagcaaacaagaggaacgagggagcctgagctaagctctgaggacttgcccaagccactgctgttggagcttcccaggaaaaaaaaaaaaaaaaaaaaaaaaaaaaaaaaaaaaaaaacaccagtttttccaacatctaattgagcttttgattaattccgtgtaccagattctactgaagaaaggtagccatg

SEQ ID NO: 1266 - DNA, 163 bp, Homo sapiens
  source 1..163: mol_type = other DNA
ctccctctttgtgcgtctcgcgccgccgccgcccgccgcgtgagaggacgggctccgcgcgctccggcagcgcattcgggtcccctccccccgggaggcttgcgaaggagaagccgccgcagaggaaaagcaggtgccggtgcctgtccccgggggcgccatg

SEQ ID NO: 1267 - DNA, 207 bp, Homo sapiens
  source 1..207: mol_type = other DNA
ccgcccctcgcgacccagagggctgctggctggctaagtccctcccgctcccggctctcgcctcactaggagcggctctcggtgcagcgggacagggcgaagcggcctgcgcccacggagcgcgcgacactgcccggaagggaccgccacccttgccccctcagctgcccactcgtgatttccagcggcctccgcgcgcgcacgatg

SEQ ID NO: 1268 - DNA, 327 bp, Homo sapiens
  source 1..327: mol_type = other DNA
ctgccctcttgcgtgccccggccacccccgggcggcttgtagccggtgcgcggggtggctggggctacgtgcagagctgtcgcggagccggaacagcagcggtgaagcccctcggctcggccgagaccgccgtgcccattgctcgcctcggttgccgccgctttagccgcagccgctgctgccgccgccgggggagaggcagcctattgtctttctccgcggcgaaggtgaggagctgtctcggctcggcccgcgggggagccccgggagccgcacggagatggaggaggacatctggacagtgagcaggaggcgcctcggcccatg

SEQ ID NO: 1269 - DNA, 183 bp, Homo sapiens
  source 1..183: mol_type = other DNA
cgccctctccccgcctccttttcgggcgtcccgaggccgctccccaaccgacaaccaagaccccgcaggccacgcagccctggagccgaggccccccgacggcggaggcgcccgcgggtcccctacagccaaggtccctgagtgccagaggtggtggtgttgcttatcttctggaaccccatg

SEQ ID NO: 1270 - DNA, 106 bp, Homo sapiens
  source 1..106: mol_type = other DNA
ctccctctcaaccacaataacaggcggagggtcggcgtaggtactttgaactcaagtaaacaaaagggaagattttctcgttgatactggagactgcacaacaatg

SEQ ID NO: 1271 - DNA, 74 bp, Homo sapiens
  source 1..74: mol_type = other DNA
agatcttttccagcagctgctgcctgccagagaggcgccttcagagacccagcgcttacacaatacccaccatg

SEQ ID NO: 1272 - DNA, 62 bp, Homo sapiens
  source 1..62: mol_type = other DNA
cctcctctccggcggcggcggcggcggcggcgggcggagtgagctgcggagcctggaatatg

SEQ ID NO: 1273 - DNA, 233 bp, Homo sapiens
  source 1..233: mol_type = other DNA
gggcctctcttgtttatttatttattttccgtgggtgcctccgagtgtgcgcgcgctctcgctacccggcggggagggggtggggggagggcccgggaaaagggggagttggagccggggtcgaaacgccgcgtgacttgtaggtgagagaacgccgagccgtcgccgcagcctccgccgccgagaagcccttgttcccgctgctgggaaggagagtctgtgccgacaagatg

SEQ ID NO: 1274 - DNA, 76 bp, Homo sapiens
  source 1..76: mol_type = other DNA
cagcctctaccccgctccggatccgggatctgagcgccggccgcggtgcccaggcactcccttggcgggccggatg

SEQ ID NO: 1275 - DNA, 205 bp, Homo sapiens
  source 1..205: mol_type = other DNA
cggccttctcggcttctccagcttcggtaggagaggatccggcgccgaatcactgactggcacaggtgttgggatagtgtctcacttggtcacccaggctggagtgcagtggcgcaatcttagctctctacagcgtcgatcttcctcctgggctcaagcaattctcctgcttcatcctcctgagtacctaggactacagaaaatg

SEQ ID NO: 1276 - DNA, 957 bp, Homo sapiens
  source 1..957: mol_type = other DNA
cagtcttttcactgcagctgaatgagttgtggcgcccacaatgctcccatgacaaggagctgacaagttccattttccgtcgcgggcatcttggaatcatgactcccacaatgccttgggcacttggtcgacagtggggccgcctctgaaaaaaaaatgtgagaggttggtactaagaagtgcctttcctgacgtctctgctgcttggaaccgcttctagagcagtctctgcttttgccttgcttgctgccagctagactgtgacgacagcacatccaccctccacctctagcccagacacccccatttctacttataatcaagagaaaagctctaagtatctggcattgccctaggctgctttagtgttaaaagaaaagtttgctgaaaaagtaagatatcttctgccaggaaatcaaggaggaaaaaaaaaatcattttctcgattttgctctaaactgctgcatctgtctatgccaaactaatcaataccgattgcaccaccaaactccattgcaaattcagctgtgaggagattccctttcagacaactttgctgaaagcagcttggaaattcggtgtcgaagggtctgccacgttttcatgcttgcattttgggctccaaattggcactgggaaggggttactgagagcacaaggctgataccaggccctacttttaaacgttcatctacttacaatcctagtatttctctaaaaaccaaaacctctttgaattaacagtttcatgctgtgaatttctagtgggagatcttttccttgatattgacgacacaattttccatgtacttttaaagcagggagtggggaaaagtattttgaggggacattttcatcatcagttcagctttttttttttggttgttgctcttttttgggggggttgggtttgttggtttcactgaaacatttaactacctgtaaaatctaaacatg

SEQ ID NO: 1277 - DNA, 425 bp, Homo sapiens
  source 1..425: mol_type = other DNA
cagccttttgctctttcctttcattaaacaaacaggagatcctgaaacctggaccctgtgcaagctgcagcgccaggaggaggcagcggaggaagcagagcgcgggatgggcgcccagcggcatctgtgatcccgcgcacctccgccccacgggcgcgcgcacaaacacggacacacacatacacacactcgcgcacacactcgcacaaacacacactcgtacacgcccgcgccgctcgctcgccggcttgctctcccacgcaagcggaatgcagcagcgcctggagagcgtgtctcggaccgccgcctgaatgtacctcgctcccgggagccggacggcccagtagggcgcactggaggacgctccgctgcgggagcctggacagtttttgacggtgcagtcttgctatatggtgtgagaaatg

SEQ ID NO: 1278 - DNA, 803 bp, Homo sapiens
  source 1..803: mol_type = other DNA
ctgtctttgcttcatcatctgaaggtaaaattttccagatacggcagacggctttcagagtacaataaacagggaatgagaactatttacatggaagtttctttctcatgatgcggtggagaagcctcggccacttggttctgccagatgttcctggggttactgtaaatgggaaggacaggcagagctaaacaaggtttatcatttaaaagtgcctgtgtgaagtcacttttgctggaaaactgcagcttgggagctttctttgtattcacatcccactcttctgtcaagtacactttaccctgaccttatgagtggatgaagatacctcagttgtctgactttgccaattgcttaatttcagaatttaaaaaggggaaagaaaaacatcctgctaaaatatgaacatctgagtgtcttattttccaacatcgtcaatagctgtgagcgtcagcattaaatattctcccaaggagtgccatgatattgaagtcactttattaataacagctgtatctgcaaaacagtcaagagactcggacgttgaaagccagagatgacactgagcatgcttttattgcggcctaccatctttaagtgggacatattgattgatgagtgattgcctgtccatacactctctcatcatcctgttccttggattggacttcactaagcaatttatcactcaccttcagacttacatgtgggagttttcacaacagtagttttggaatcattagaacttggattgatttcatcatttaacagaaacaaacagcccaaattactttatcaccatg

SEQ ID NO: 1279 - DNA, 123 bp, Homo sapiens
  source 1..123: mol_type = other DNA
gcgcctttcgcacgacttggagttacggtttatctgataccgcggtacccctacgcaagcaagcccacatcgacacacattcacacacgcccttcagcaccccctcccagcaccacgaccatg

SEQ ID NO: 1280 - DNA, 320 bp, Homo sapiens
  source 1..320: mol_type = other DNA
cctcctcctttccctgggtgcccacatgaacagagacaccaggatgctctcctgagaccacagcaactgcagaagctgaagacatttccagaagttcaagcttccaccctctgcaggtccccactgagctgggacccaggtcatccaccccaccccaaatccctggataggaaacccctttctcctcctgctccttgtccccttcatccctgccgcccagcatcctactggcctcagcacctgtggccagaccgtccaagatcctctgaaggcccagctcttgctgtccaccccggcagtaggcaggcagcctggccatg

SEQ ID NO: 1281 - DNA, 240 bp, Homo sapiens
  source 1..240: mol_type = other DNA
gcctccctcccccgcagctggggccagcggtgccaagcgcagctggacgagcggcagcagctgggcgagtgacagccccggctccgcgcgccgcggccgccagagccggcgcaggggaagcgcccgcggccccgggtgcagcagcggccgccgcctcccgcgcctccccggcccgcagcccgcggtcccgcggccccggggccggcacctctcgggctccggctccccgcgcgcaagatg

SEQ ID NO: 1282 - DNA, 45 bp, Homo sapiens
  source 1..45: mol_type = other DNA
ccctccctccgcgcggggacccctggcgggcggcaggaggacatg

SEQ ID NO: 1283 - DNA, 242 bp, Homo sapiens
  source 1..242: mol_type = other DNA
ccttctctggttccctgacctcagtgagacagcagccggcctggggacctgggggagacacggaggaccccctggctggagctgacccacagagtagggaatcatggctggagaattggatagcagagtaatgtttgacctctggaaacatcacttacagggcttccggtcaaaattcactaggtaggagggtcatcagctgggaagaaccggcgcctgggaaacctggctggataggtatg

SEQ ID NO: 1284 - DNA, 33 bp, Homo sapiens
  source 1..33: mol_type = other DNA
cgttctttctttgctgcgtctactgcgagaatg

SEQ ID NO: 1285 - DNA, 33 bp, Homo sapiens
  source 1..33: mol_type = other DNA
cggcctctaccggcgggatttgatggcgtgatg

SEQ ID NO: 1286 - DNA, 64 bp, Homo sapiens
  source 1..64: mol_type = other DNA
acttccttttcctgtggcagcagccgggctgagaggagcgtggctgtctcctctctccgccatg

SEQ ID NO: 1287 - DNA, 82 bp, Homo sapiens
  source 1..82: mol_type = other DNA
tggcccttttcccaccccctagcgccgctgggcctgcaggtctctgtcgagcagcggacgccggtctctgttccgcaggatg

SEQ ID NO: 1288 - DNA, 26 bp, Homo sapiens
  source 1..26: mol_type = other DNA
aattctctttcccatcttgcaagatg

SEQ ID NO: 1289 - DNA, 27 bp, Homo sapiens
  source 1..27: mol_type = other DNA
cttcctctttttccggctggaaccatg

SEQ ID NO: 1290 - DNA, 34 bp, Homo sapiens
  source 1..34: mol_type = other DNA
ctttcctttctctctcctcccgccgcccaagatg

SEQ ID NO: 1291 - DNA, 25 bp, Homo sapiens
  source 1..25: mol_type = other DNA
ctttctcttcctgctctccatcatg

SEQ ID NO: 1292 - DNA, 95 bp, Homo sapiens
  source 1..95: mol_type = other DNA
cggcctctcggctttcggctcggaggaggccaaggtgcaacttccttcggtcgtcccgaatccgggttcatccgacaccagccgcctccaccatg

SEQ ID NO: 1293 - DNA, 59 bp, Homo sapiens
  source 1..59: mol_type = other DNA
gcttcctttccgctcggctgttttcctgcgcaggagccgcagggccgtaggcagccatg

SEQ ID NO: 1294 - DNA, 34 bp, Homo sapiens
  source 1..34: mol_type = other DNA
acttccttttttcttttttccggcgttcaagatg

SEQ ID NO: 1295 - DNA, 44 bp, Homo sapiens
  source 1..44: mol_type = other DNA
cgttctctctttccggacctggccgagcaggaggcgccatcatg

SEQ ID NO: 1296 - DNA, 43 bp, Homo sapiens
  source 1..43: mol_type = other DNA
acttccttttgcgggtggcggcgaacgcggagagcacgccatg

SEQ ID NO: 1297 - DNA, 35 bp, Homo sapiens
  source 1..35: mol_type = other DNA
agctctttcctttcgctgctgcggccgcagccatg

SEQ ID NO: 1298 - DNA, 51 bp, Homo sapiens
  source 1..51: mol_type = other DNA
gcctctttcctttcggccggaaccgccatcttccagtaattcgccaaaatg

SEQ ID NO: 1299 - DNA, 30 bp, Homo sapiens
  source 1..30: mol_type = other DNA
acctccctttctaactccgctgccgccatg

SEQ ID NO: 1300 - DNA, 19 bp, Homo sapiens
  source 1..19: mol_type = other DNA
agacccttttcacaagatg

SEQ ID NO: 1301 - DNA, 295 bp, Homo sapiens
  source 1..295: mol_type = other DNA
cgctcttcctctttccctaagcagcctgagggttgactggattggtgaggcccgtgtggctacttctgtggaagcagtgctgtagttactggaagataaaagggaaagcaagcccttggtgggggaaagtatggctgcgatgatggcatttcttaggacacctttggattaataatgaaaacaactactctctgagcagctgttcgaatcatctgatatttatactgaatgagttactgtaagtacgtattgacagaattacactgtactttcctctaggtgatctgtgaaaatg

SEQ ID NO: 1302 - DNA, 51 bp, Homo sapiens
  source 1..51: mol_type = other DNA
ttctctctttcttttcgccatcttttgtctttccgtggagctgtcgccatg

SEQ ID NO: 1303 - DNA, 49 bp, Homo sapiens
  source 1..49: mol_type = other DNA
agttctcttcccttttgcggccatcaccgaagcgggagcggccaaaatg

SEQ ID NO: 1304 - DNA, 43 bp, Homo sapiens
  source 1..43: mol_type = other DNA
ctttcctttttgctggtagggccgggtggttgctgccgaaatg

SEQ ID NO: 1305 - DNA, 81 bp, Homo sapiens
  source 1..81: mol_type = other DNA
aagtctttcctttctcgttccccggccatcttagcggctgctgttggttgggggccgtcccgctcctaaggcaggaagatg

SEQ ID NO: 1306 - DNA, 30 bp, Homo sapiens
  source 1..30: mol_type = other DNA
ccttcctttttcgtctgggctgccaacatg

SEQ ID NO: 1307 - DNA, 49 bp, Homo sapiens
  source 1..49: mol_type = other DNA
cttcctctttccgtctcaggtcgccgctgcgaagggagccgccgccatg

SEQ ID NO: 1308 - DNA, 60 bp, Homo sapiens
  source 1..60: mol_type = other DNA
cagcccctttctcttccggttctaggcgcttcgggagccgcggcttatggtgcagacatg

SEQ ID NO: 1309 - DNA, 34 bp, Homo sapiens
  source 1..34: mol_type = other DNA
cgctcttcctttccaacttggacgctgcagaatg

SEQ ID NO: 1310 - DNA, 65 bp, Homo sapiens
  source 1..65: mol_type = other DNA
ccgtcccttctctcttcctcggcgctgcctacggaggtggcagccatctccttctcggcatcatg

SEQ ID NO: 1311 - DNA, 71 bp, Homo sapiens
  source 1..71: mol_type = other DNA
cgtccttctcttaccgccatcttggctcctgtggaggcctgctgggaacgggacttctaaaaggaactatg

SEQ ID NO: 1312 - DNA, 44 bp, Homo sapiens
  source 1..44: mol_type = other DNA
ccttctcttccggtctttctggtctcggccgcagaagcgagatg

SEQ ID NO: 1313 - DNA, 44 bp, Homo sapiens
  source 1..44: mol_type = other DNA
gcgtctcttcctttctgggctcggacctaggtcgcggcgacatg

SEQ ID NO: 1314 - DNA, 113 bp, Homo sapiens
  source 1..113: mol_type = other DNA
cgttctttttcgtccttttccccggttgctgcttgctgtgagtgtctctagggtgatacgtgggtgagaaaggtcctggtccgcgccagagcccagcgcgcctcgtcgccatg

SEQ ID NO: 1315 - DNA, 57 bp, Homo sapiens
  source 1..57: mol_type = other DNA
ccctcctcttcctttctccgccatcgtggtgtgttcttgactccgctgctcgccatg

SEQ ID NO: 1316 - DNA, 84 bp, Homo sapiens
  source 1..84: mol_type = other DNA
aggcccttctctcgccaggcgtcctcgtggaagtgacatcgtctttaaaccctgcgtggcaatccctgacgcaccgccgtgatg

SEQ ID NO: 1317 - DNA, 105 bp, Homo sapiens
  source 1..105: mol_type = other DNA
cggtccttccgaggaagctaaggctgcgttggggtgaggccctcacttcatccggcgactagcaccgcgtccggcagcgccagccctacactcgcccgcgccatg

SEQ ID NO: 1318 - DNA, 81 bp, Homo sapiens
  source 1..81: mol_type = other DNA
ccttccttttcctccctgtcgccaccgaggtcgcacgcgtgagacttctccgccgcctccgccgcagacgccgccgcgatg

SEQ ID NO: 1319 - DNA, 37 bp, Homo sapiens
  source 1..37: mol_type = other DNA
acttcctttcctttcagcggagcgcggcggcaagatg

SEQ ID NO: 1320 - DNA, 31 bp, Homo sapiens
  source 1..31: mol_type = other DNA
ccgcccttttggctctctgaccagcaccatg

SEQ ID NO: 1321 - DNA, 30 bp, Homo sapiens
  source 1..30: mol_type = other DNA
ggtcctctttccttgcctaacgcagccatg

SEQ ID NO: 1322 - DNA, 30 bp, Homo sapiens
  source 1..30: mol_type = other DNA
gattctcttccgtcgcagagtttcgccatg

SEQ ID NO: 1323 - DNA, 115 bp, Homo sapiens
  source 1..115: mol_type = other DNA
ttttcttcccagttaaaagtgttggcccgcggcgcgcggcctcttcctgtctgtaccagggcggcgcgtggtctacgccgagtgacagagacgctcaggctgtgttctcaggatg

SEQ ID NO: 1324 - DNA, 48 bp, Homo sapiens
  source 1..48: mol_type = other DNA
ggccctcttttccgtggcgcctcggaggcgttcagctgcttcaagatg

SEQ ID NO: 1325 - DNA, 51 bp, Homo sapiens
  source 1..51: mol_type = other DNA
gggtctcttcctaagccggcgctcggcaagttctcccaggagaaagccatg

SEQ ID NO: 1326 - DNA, 30 bp, Homo sapiens
  source 1..30: mol_type = other DNA
gtttctctttccagccagcgccgagcgatg

SEQ ID NO: 1327 - DNA, 63 bp, Homo sapiens
  source 1..63: mol_type = other DNA
gcgcctctttctcagtgaccgggtggtttgcttaggcgcagacggggaagcggagccaacatg

SEQ ID NO: 1328 - DNA, 48 bp, Homo sapiens
  source 1..48: mol_type = other DNA
gctccttcctttccagccccggtaccggaccctgcagccgcagagatg

SEQ ID NO: 1329 - DNA, 36 bp, Homo sapiens
  source 1..36: mol_type = other DNA
ctgcccctttctttttttcaggcggccgggaagatg

SEQ ID NO: 1330 - DNA, 89 bp, Homo sapiens
  source 1..89: mol_type = other DNA
aggcctctttccctgccgccgccgagtcgcgcggaggcggaggcttgggtgcgttcaagattcaacttcacccgtaacccaccgccatg

SEQ ID NO: 1331 - DNA, 35 bp, Homo sapiens
  source 1..35: mol_type = other DNA
cgctctcctttcgttgcctgatcgccgccatcatg

SEQ ID NO: 1332 - DNA, 28 bp, Homo sapiens
  source 1..28: mol_type = other DNA
cgatctcttctgaggatccggcaagatg

SEQ ID NO: 1333 - DNA, 103 bp, Homo sapiens
  source 1..103: mol_type = other DNA
cgtcctctttccgccatctttccgcgccggtgagtagcactctctgagagctccaatttcatccgtctgccatcggcgccatcctgcaatctaagccacaatg

SEQ ID NO: 1334 - DNA, 61 bp, Homo sapiens
  source 1..61: mol_type = other DNA
ctttccttttccggttgcggcgccgcgcggtgaggttgtctagtccacgctcggagccatg

SEQ ID NO: 1335 - DNA, 42 bp, Homo sapiens
  source 1..42: mol_type = other DNA
cgttccctttcccctggctggcagcgcggaggccgcacgatg

SEQ ID NO: 1336 - DNA, 136 bp, Homo sapiens
  source 1..136: mol_type = other DNA
ccacccctttctttttgaggaagacgcggtcgtaagggctgaggatttttggtccgcacgctcctgctcctgactcaccgctgttcgctctcgccgaggaacaagtcggtcaggaagcccgcgcgcaacagccatg

SEQ ID NO: 1337 - DNA, 59 bp, Homo sapiens
  source 1..59: mol_type = other DNA
gcttcctttctctctcgcgcgcggtgtggtggcagcaggcgcagcccagcctcgaaatg

SEQ ID NO: 1338 - DNA, 40 bp, Homo sapiens
  source 1..40: mol_type = other DNA
gcttctctctttcgctcaggcccgtggcgccgacaggatg

SEQ ID NO: 1339 - DNA, 67 bp, Homo sapiens
  source 1..67: mol_type = other DNA
gcttcctttttgtccgacatcttgacgaggctgcggtgtctgctgctattctccgagcttcgcaatg

SEQ ID NO: 1340 - DNA, 34 bp, Homo sapiens
  source 1..34: mol_type = other DNA
ccgtctcctctctccggtccgtgcctccaagatg

SEQ ID NO: 1341 - DNA, 42 bp, Homo sapiens
  source 1..42: mol_type = other DNA
cgctcctttccggcggtgacgacctacgcacacgagaacatg

SEQ ID NO: 1342 - DNA, 38 bp, Homo sapiens
  source 1..38: mol_type = other DNA
actcctctccgccagaccgccgccgcgccgccatcatg

SEQ ID NO: 1343 - DNA, 41 bp, Homo sapiens
  source 1..41: mol_type = other DNA
gcttcttccttttacctcgttgcactgctgagagcaagatg

SEQ ID NO: 1344 - DNA, 30 bp, Homo sapiens
  source 1..30: mol_type = other DNA
cgttcttcttttccgacaaaacaccaaatg

SEQ ID NO: 1345 - DNA, 30 bp, Homo sapiens; identical to SEQ ID NO: 1344
  source 1..30: mol_type = other DNA

SEQ ID NO: 1346 - DNA, 36 bp, Homo sapiens
  source 1..36: mol_type = other DNA
gggtcttcttccttctcgcctaacgccgccaacatg

SEQ ID NO: 1347 - DNA, 42 bp, Homo sapiens
  source 1..42: mol_type = other DNA
ctctctttccggtgtggagtctggagacgacgtgcagaaatg

SEQ ID NO: 1348 - DNA, 48 bp, Homo sapiens
  source 1..48: mol_type = other DNA
gcgcctctttcccttcggtgtgccactgaagatcctggtgtcgccatg

SEQ ID NO: 1349 - DNA, 38 bp, Homo sapiens
  source 1..38: mol_type = other DNA
tagtctcttttccggttagcgcggcgtgagaagccatg

SEQ ID NO: 1350 - DNA, 50 bp, Homo sapiens
  source 1..50: mol_type = other DNA
tcctctttccctcggagcgggcggcggcgttggcggcttgtgcagcaatg

SEQ ID NO: 1351 - DNA, 32 bp, Homo sapiens
  source 1..32: mol_type = other DNA
cctcctccttttccaagcggctgccgaagatg

SEQ ID NO: 1352 - DNA, 42 bp, Homo sapiens
  source 1..42: mol_type = other DNA
cagcccttccgccacggccgtctctggagagcagcagccatg

SEQ ID NO: 1353 - DNA, 40 bp, Homo sapiens
  source 1..40: mol_type = other DNA
gtttctttctttccgcgccgatagcgctcacgcaagcatg

SEQ ID NO: 1354 - DNA, 51 bp, Homo sapiens
  source 1..51: mol_type = other DNA
tcgcctttctctcggccttagcgccatttttttggaaacctctgcgccatg

SEQ ID NO: 1355 - DNA, 52 bp, Homo sapiens
  source 1..52: mol_type = other DNA
cgctctctcttccacaggaggcctacacgccgccgcttgtgctgcagccatg

SEQ ID NO: 1356 - DNA, 46 bp, Homo sapiens
  source 1..46: mol_type = other DNA
ggttctcttttcctccttggctgtctgaagatagatcgccatcatg

SEQ ID NO: 1357 - DNA, 58 bp, Homo sapiens
  source 1..58: mol_type = other DNA
tttcctctttcggccgcgctggtgaacaggtaggtcatccttgcggccttgcggcatg

SEQ ID NO: 1358 - DNA, 33 bp, Homo sapiens
  source 1..33: mol_type = other DNA
cttcctcttccggggacgttgtctgcaggtatg

SEQ ID NO: 1359 - DNA, 32 bp, Homo sapiens
  source 1..32: mol_type = other DNA
gtttcctcttttaccaaggacccgccaacatg

SEQ ID NO: 1360 - DNA, 85 bp, Homo sapiens; identical to SEQ ID NO: 193
  source 1..85: mol_type = other DNA

SEQ ID NO: 1361 - DNA, 91 bp, Homo sapiens
  source 1..91: mol_type = other DNA
cttctctctcggcgtttccgctgtcagggccctgcggtgtgactcgcgggctcagctggtccggccgtagcacctccgcgccgtcgccatg

SEQ ID NO: 1362 - DNA, 62 bp, Homo sapiens
  source 1..62: mol_type = other DNA
cgctctcctcctctcacggaaaggtcgcggcctgtggccctgcgggcagccgtgccgagatg

SEQ ID NO: 1363 - DNA, 241 bp, Homo sapiens
  source 1..241: mol_type = other DNA
cactcccttccaaaagcatgacaggcagaaagcagagaagggccaggactggctgagggcggggagctgggcctctggggtggacacacccttggtcacattgtgagggtagcttggttggccagtcccaccactgcagtgaccacagttgtgttgggctcacaccagtgaaccgaagctctggattctgagagtctgaggattccgtgaagatctcagacttgggctcagagcaaggatg

SEQ ID NO: 1364 - DNA, 1812 bp, synthetic construct
  misc_feature 1..1812: note = PpLuc(GC) agA64
  source 1..1812: mol_type = other DNA
gggagaaagcttgaggatggaggacgccaagaacatcaagaagggcccggcgcccttctacccgctggaggacgggaccgccggcgagcagctccacaaggccatgaagcggtacgccctggtgccgggcacgatcgccttcaccgacgcccacatcgaggtcgacatcacctacgcggagtacttcgagatgagcgtgcgcctggccgaggccatgaagcggtacggcctgaacaccaaccaccggatcgtggtgtgctcggagaacagcctgcagttcttcatgccggtgctgggcgccctcttcatcggcgtggccgtcgccccggcgaacgacatctacaacgagcgggagctgctgaacagcatggggatcagccagccgaccgtggtgttcgtgagcaagaagggcctgcagaagatcctgaacgtgcagaagaagctgcccatcatccagaagatcatcatcatggacagcaagaccgactaccagggcttccagtcgatgtacacgttcgtgaccagccacctcccgccgggcttcaacgagtacgacttcgtcccggagagcttcgaccgggacaagaccatcgccctgatcatgaacagcagcggcagcaccggcctgccgaagggggtggccctgccgcaccggaccgcctgcgtgcgcttctcgcacgcccgggaccccatcttcggcaaccagatcatcccggacaccgccatcctgagcgtggtgccgttccaccacggcttcggcatgttcacgaccctgggctacctcatctgcggcttccgggtggtcctgatgtaccggttcgaggaggagctgttcctgcggagcctgcaggactacaagatccagagcgcgctgctcgtgccgaccctgttcagcttcttcgccaagagcaccctgatcgacaagtacgacctgtcgaacctgcacgagatcgccagcgggggcgccccgctgagcaaggaggtgggcgaggccgtggccaagcggttccacctcccgggcatccgccagggctacggcctgaccgagaccacgagcgcgatcctgatcacccccgagggggacgacaagccgggcgccgtgggcaaggtggtcccgttcttcgaggccaaggtggtggacctggacaccggcaagaccctgggcgtgaaccagcggggcgagctgtgcgtgcgggggccgatgatcatgagcggctacgtgaacaacccggaggccaccaacgccctcatcgacaaggacggctggctgcacagcggcgacatcgcctactgggacgaggacgagcacttcttcatcgtcgaccggctgaagtcgctgatcaagtacaagggctaccaggtggcgccggccgagctggagagcatcctgctccagcaccccaacatcttcgacgccggcgtggccgggctgccggacgacgacgccggcgagctgccggccgcggtggtggtgctggagcacggcaagaccatgacggagaaggagatcgtcgactacgtggccagccaggtgaccaccgccaagaagctgcggggcggcgtggtgttcgtggacgaggtcccgaagggcctgaccgggaagctcgacgcccggaagatccgcgagatcctgatcaaggccaagaagggcggcaagatcgccgtgtaagactagttataagactgactagcccgatgggcctcccaacgggccctcctcccctccttgcaccgagattaatagatctaaaaaaaaaaaaaaaaaaaaaaaaaaaaaaaaaaaaaaaaaaaaaaaaaaaaaaaaaaaaaaaa

SEQ ID NO: 1365 - DNA, 1914 bp, synthetic construct
  misc_feature 1..1914: note = 32L PpLuc(GC) ag A64 C30 histoneSL
  source 1..1914: mol_type = other DNA
ggggcgctgcctacggaggtggcagccatctccttctcggcatcaagcttgaggatggaggacgccaagaacatcaagaagggcccggcgcccttctacccgctggaggacgggaccgccggcgagcagctccacaaggccatgaagcggtacgccctggtgccgggcacgatcgccttcaccgacgcccacatcgaggtcgacatcacctacgcggagtacttcgagatgagcgtgcgcctggccgaggccatgaagcggtacggcctgaacaccaaccaccggatcgtggtgtgctcggagaacagcctgcagttcttcatgccggtgctgggcgccctcttcatcggcgtggccgtcgccccggcgaacgacatctacaacgagcgggagctgctgaacagcatggggatcagccagccgaccgtggtgttcgtgagcaagaagggcctgcagaagatcctgaacgtgcagaagaagctgcccatcatccagaagatcatcatcatggacagcaagaccgactaccagggcttccagtcgatgtacacgttcgtgaccagccacctcccgccgggcttcaacgagtacgacttcgtcccggagagcttcgaccgggacaagaccatcgccctgatcatgaacagcagcggcagcaccggcctgccgaagggggtggccctgccgcaccggaccgcctgcgtgcgcttctcgcacgcccgggaccccatcttcggcaaccagatcatcccggacaccgccatcctgagcgtggtgccgttccaccacggcttcggcatgttcacgaccctgggctacctcatctgcggcttccgggtggtcctgatgtaccggttcgaggaggagctgttcctgcggagcctgcaggactacaagatccagagcgcgctgctcgtgccgaccctgttcagcttcttcgccaagagcaccctgatcgacaagtacgacctgtcgaacctgcacgagatcgccagcgggggcgccccgctgagcaaggaggtgggcgaggccgtggccaagcggttccacctcccgggcatccgccagggctacggcctgaccgagaccacgagcgcgatcctgatcacccccgagggggacgacaagccgggcgccgtgggcaaggtggtcccgttcttcgaggccaaggtggtggacctggacaccggcaagaccctgggcgtgaaccagcggggcgagctgtgcgtgcgggggccgatgatcatgagcggctacgtgaacaacccggaggccaccaacgccctcatcgacaaggacggctggctgcacagcggcgacatcgcctactgggacgaggacgagcacttcttcatcgtcgaccggctgaagtcgctgatcaagtacaagggctaccaggtggcgccggccgagctggagagcatcctgctccagcaccccaacatcttcgacgccggcgtggccgggctgccggacgacgacgccggcgagctgccggccgcggtggtggtgctggagcacggcaagaccatgacggagaaggagatcgtcgactacgtggccagccaggtgaccaccgccaagaagctgcggggcggcgtggtgttcgtggacgaggtcccgaagggcctgaccgggaagctcgacgcccggaagatccgcgagatcctgatcaaggccaagaagggcggcaagatcgccgtgtaagactagttataagactgactagcccgatgggcctcccaacgggccctcctcccctccttgcaccgagattaatagatctaaaaaaaaaaaaaaaaaaaaaaaaaaaaaaaaaaaaaaaaaaaaaaaaaaaaaaaaaaaaaaaatgcatcccccccccccccccccccccccccccccccaaaggctcttttcagagccaccagaatt

SEQ ID NO: 1366 - DNA, 1848 bp, synthetic construct
  misc_feature 1..1848: note = 32L PpLuc(GC) A64N64
  source 1..1848: mol_type = other DNA
ggggcgctgcctacggaggtggcagccatctccttctcggcatcaagcttgaggatggaggacgccaagaacatcaagaagggcccggcgcccttctacccgctggaggacgggaccgccggcgagcagctccacaaggccatgaagcggtacgccctggtgccgggcacgatcgccttcaccgacgcccacatcgaggtcgacatcacctacgcggagtacttcgagatgagcgtgcgcctggccgaggccatgaagcggtacggcctgaacaccaaccaccggatcgtggtgtgctcggagaacagcctgcagttcttcatgccggtgctgggcgccctcttcatcggcgtggccgtcgccccggcgaacgacatctacaacgagcgggagctgctgaacagcatggggatcagccagccgaccgtggtgttcgtgagcaagaagggcctgcagaagatcctgaacgtgcagaagaagctgcccatcatccagaagatcatcatcatggacagcaagaccgactaccagggcttccagtcgatgtacacgttcgtgaccagccacctcccgccgggcttcaacgagtacgacttcgtcccggagagcttcgaccgggacaagaccatcgccctgatcatgaacagcagcggcagcaccggcctgccgaagggggtggccctgccgcaccggaccgcctgcgtgcgcttctcgcacgcccgggaccccatcttcggcaaccagatcatcccggacaccgccatcctgagcgtggtgccgttccaccacggcttcggcatgttcacgaccctgggctacctcatctgcggcttccgggtggtcctgatgtaccggttcgaggaggagctgttcctgcggagcctgcaggactacaagatccagagcgcgctgctcgtgccgaccctgttcagcttcttcgccaagagcaccctgatcgacaagtacgacctgtcgaacctgcacgagatcgccagcgggggcgccccgctgagcaaggaggtgggcgaggccgtggccaagcggttccacctcccgggcatccgccagggctacggcctgaccgagaccacgagcgcgatcctgatcacccccgagggggacgacaagccgggcgccgtgggcaaggtggtcccgttcttcgaggccaaggtggtggacctggacaccggcaagaccctgggcgtgaaccagcggggcgagctgtgcgtgcgggggccgatgatcatgagcggctacgtgaacaacccggaggccaccaacgccctcatcgacaaggacggctggctgcacagcggcgacatcgcctactgggacgaggacgagcacttcttcatcgtcgaccggctgaagtcgctgatcaagtacaagggctaccaggtggcgccggccgagctggagagcatcctgctccagcaccccaacatcttcgacgccggcgtggccgggctgccggacgacgacgccggcgagctgccggccgcggtggtggtgctggagcacggcaagaccatgacggagaaggagatcgtcgactacgtggccagccaggtgaccaccgccaagaagctgcggggcggcgtggtgttcgtggacgaggtcccgaagggcctgaccgggaagctcgacgcccggaagatccgcgagatcctgatcaaggccaagaagggcggcaagatcgccgtgtaagactagtagatctaaaaaaaaaaaaaaaaaaaaaaaaaaaaaaaaaaaaaaaaaaaaaaaaaaaaaaaaaaaaaaaatgcatcccccccccccccccccccccccccccccccaaaggctcttttcagagccaccagaatt

SEQ ID NO: 1367 - DNA, 2035 bp, synthetic construct
  misc_feature 1..2035: note = 32L PpLuc(GC) albumin7 A64N64
  source 1..2035: mol_type = other DNA
ggggcgctgcctacggaggtggcagccatctccttctcggcatcaagcttgaggatggaggacgccaagaacatcaagaagggcccggcgcccttctacccgctggaggacgggaccgccggcgagcagctccacaaggccatgaagcggtacgccctggtgccgggcacgatcgccttcaccgacgcccacatcgaggtcgacatcacctacgcggagtacttcgagatgagcgtgcgcctggccgaggccatgaagcggtacggcctgaacaccaaccaccggatcgtggtgtgctcggagaacagcctgcagttcttcatgccggtgctgggcgccctcttcatcggcgtggccgtcgccccggcgaacgacatctacaacgagcgggagctgctgaacagcatggggatcagccagccgaccgtggtgttcgtgagcaagaagggcctgcagaagatcctgaacgtgcagaagaagctgcccatcatccagaagatcatcatcatggacagcaagaccgactaccagggcttccagtcgatgtacacgttcgtgaccagccacctcccgccgggcttcaacgagtacgacttcgtcccggagagcttcgaccgggacaagaccatcgccctgatcatgaacagcagcggcagcaccggcctgccgaagggggtggccctgccgcaccggaccgcctgcgtgcgcttctcgcacgcccgggaccccatcttcggcaaccagatcatcccggacaccgccatcctgagcgtggtgccgttccaccacggcttcggcatgttcacgaccctgggctacctcatctgcggcttccgggtggtcctgatgtaccggttcgaggaggagctgttcctgcggagcctgcaggactacaagatccagagcgcgctgctcgtgccgaccctgttcagcttcttcgccaagagcaccctgatcgacaagtacgacctgtcgaacctgcacgagatcgccagcgggggcgccccgctgagcaaggaggtgggcgaggccgtggccaagcggttccacctcccgggcatccgccagggctacggcctgaccgagaccacgagcgcgatcctgatcacccccgagggggacgacaagccgggcgccgtgggcaaggtggtcccgttcttcgaggccaaggtggtggacctggacaccggcaagaccctgggcgtgaaccagcggggcgagctgtgcgtgcgggggccgatgatcatgagcggctacgtgaacaacccggaggccaccaacgccctcatcgacaaggacggctggctgcacagcggcgacatcgcctactgggacgaggacgagcacttcttcatcgtcgaccggctgaagtcgctgatcaagtacaagggctaccaggtggcgccggccgagctggagagcatcctgctccagcaccccaacatcttcgacgccggcgtggccgggctgccggacgacgacgccggcgagctgccggccgcggtggtggtgctggagcacggcaagaccatgacggagaaggagatcgtcgactacgtggccagccaggtgaccaccgccaagaagctgcggggcggcgtggtgttcgtggacgaggtcccgaagggcctgaccgggaagctcgacgcccggaagatccgcgagatcctgatcaaggccaagaagggcggcaagatcgccgtgtaagactagtgcatcacatttaaaagcatctcagcctaccatgagaataagagaaagaaaatgaagatcaatagcttattcatctctttttctttttcgttggtgtaaagccaacaccctgtctaaaaaacataaatttctttaatcattttgcctcttttctctgtgcttcaattaataaaaaatggaaagaacctagatctaaaaaaaaaaaaaaaaaaaaaaaaaaaaaaaaaaaaaaaaaaaaaaaaaaaaaaaaaaaaaaaatgcatcccccccccccccccccccccccccccccccaaaggctcttttcagagccaccagaatt

SEQ ID NO: 1368 - DNA, 42 bp, synthetic construct
  misc_feature 1..42: note = 5UTR of human ribosomal protein Large 32 lacking the 5 terminal oligopyrimidine tract
  source 1..42: mol_type = other DNA
ggcgctgcctacggaggtggcagccatctccttctcggcatc

SEQ ID NO: 1369 - DNA, 186 bp, Homo sapiens
  source 1..186: mol_type = other DNA
catcacatttaaaagcatctcagcctaccatgagaataagagaaagaaaatgaagatcaaaagcttattcatctgtttttctttttcgttggtgtaaagccaacaccctgtctaaaaaacataaatttctttaatcattttgcctcttttctctgtgcttcaattaataaaaaatggaaagaatct

SEQ ID NO: 1370 - DNA, 110 bp, Homo sapiens
  source 1..110: mol_type = other DNA
gctggagcctcggtggccatgcttcttgccccttgggcctccccccagcccctcctccccttcctgcacccgtacccccgtggtctttgaataaagtctgagtgggcggc

SEQ ID NO: 1371 - DNA, 108 bp, Homo sapiens
  source 1..108: mol_type = other DNA
gctggagcctcggtagccgttcctcctgcccgctgggcctcccaacgggccctcctcccctccttgcaccggcccttcctggtctttgaataaagtctgagtgggcag

SEQ ID NO: 1372 - DNA, 132 bp, Homo sapiens
  source 1..132: mol_type = other DNA
gctcgctttcttgctgtccaatttctattaaaggttcctttgttccctaagtccaactactaaactgggggatattatgaagggccttgagcatctggattctgcctaataaaaaacatttattttcattgc

SEQ ID NO: 1373 - DNA, 304 bp, Homo sapiens
  source 1..304: mol_type = other DNA
gtgcacggcgtccctgagggcccttcccaacctcccctggtcctgcactgtcccggagctcaggccctggtgaggggctgggtcccgggtgccccccatgccctccctgctgccaggctcccactgcccctgcacctgcttctcagcgcaacagctgtgtgtgcccgtggtgaggttgtgctgcctgtggtgaggtcctgtcctggctcccagggtcctgggggctgctgcactgccctccgcccttccctgacactgtctgctgccccaatcaccgtcacaataaaagaaactgtggtctcta

SEQ ID NO: 1374 - DNA, 674 bp, Homo sapiens
  source 1..674: mol_type = other DNA
gcgtcgccaccctttggttatttcagcccccatcacccaagccacaagctgaccccttcgtggttatagccctgccctcccaagtcccaccctcttcccatgtcccaccctccctagaggggcaccttttcatggtctctgcacccagtgaacacattttactctagaggcatcacctgggaccttactcctctttccttccttcctcctttcctatcttccttcctctctctcttcctctttcttcattcagatctatatggcaaatagccacaattatataaatcatttcaagactagaatagggggatataatacatattactccacaccttttatgaatcaaatatgatttttttgttgttgttaagacagagtctcactttgacacccaggctggagtgcagtggtgccatcaccacggctcactgcagcctcagcgtcctgggctcaaatgatcctcccacctcagcctcctgagtagctgggactacaggctcatgccatcatgcccagctaatatttttttattttcgtggagacggggcctcactatgttgcctaggctggaaataggattttgaacccaaattgagtttaacaataataaaaagttgttttacgctaaagatggaaaagaactaggactgaactattttaaataaaatattggc

SEQ ID NO: 1375 - DNA, 1406 bp, Homo sapiens
  source 1..1406: mol_type = other DNA
actccctccatcccaacctggctccctcccacccaaccaactttccccccaacccggaaacagacaagcaacccaaactgaaccccctcaaaagccaaaaaatgggagacaatttcacatggactttggaaaatatttttttcctttgcattcatctctcaaacttagtttttatctttgaccaaccgaacatgaccaaaaaccaaaagtgcattcaaccttaccaaaaaaaaaaaaaaaaaaagaataaataaataactttttaaaaaaggaagcttggtccacttgcttgaagacccatgcgggggtaagtccctttctgcccgttgggcttatgaaaccccaatgctgccctttctgctcctttctccacaccccccttggggcctcccctccactccttcccaaatctgtctccccagaagacacaggaaacaatgtattgtctgcccagcaatcaaaggcaatgctcaaacacccaagtggcccccaccctcagcccgctcctgcccgcccagcacccccaggccctgggggacctggggttctcagactgccaaagaagccttgccatctggcgctcccatggctcttgcaacatctccccttcgtttttgagggggtcatgccgggggagccaccagcccctcactgggttcggaggagagtcaggaagggccacgacaaagcagaaacatcggatttggggaacgcgtgtcaatcccttgtgccgcagggctgggcgggagagactgttctgttccttgtgtaactgtgttgctgaaagactacctcgttcttgtcttgatgtgtcaccggggcaactgcctgggggcggggatgggggcagggtggaagcggctccccattttataccaaaggtgctacatctatgtgatgggtggggtggggagggaatcactggtgctatagaaattgagatgcccccccaggccagcaaatgttcctttttgttcaaagtctatttttattccttgatatttttctttttttttttttttttttgtggatggggacttgtgaatttttctaaaggtgctatttaacatgggaggagagcgtgtgcggctccagcccagcccgctgctcactttccaccctctctccacctgcctctggcttctcaggcctctgctctccgacctctctcctctgaaaccctcctccacagctgcagcccatcctcccggctccctcctagtctgtcctgcgtcctctgtccccgggtttcagagacaacttcccaaagcacaaagcagtttttccccctaggggtgggaggaagcaaaagactctgtacctattttgtatgtgtataataatttgagatgtttttaattattttgattgctggaataaagcatgtggaaatgacccaaacataa

SEQ ID NO: 1376 - DNA, 186 bp, Homo sapiens
  source 1..186: mol_type = other DNA
catcacatttaaaagcatctcagcctaccatgagaataagagaaagaaaatgaagatcaatagcttattcatctctttttctttttcgttggtgtaaagccaacaccctgtctaaaaaacataaatttctttaatcattttgcctcttttctctgtgcttcaattaataaaaaatggaaagaacct

SEQ ID NO: 1377 - DNA, 256 bp, synthetic construct
  misc_feature 1..256: note = Human albumin 3UTR + poly(A) sequence
  source 1..256: mol_type = other DNA
catcacatttaaaagcatctcagcctaccatgagaataagagaaagaaaatgaagatcaaaagcttattcatctgtttttctttttcgttggtgtaaagccaacaccctgtctaaaaaacataaatttctttaatcattttgcctcttttctctgtgcttcaattaataaaaaatggaaagaatctagatctaaaaaaaaaaaaaaaaaaaaaaaaaaaaaaaaaaaaaaaaaaaaaaaaaaaaaaaaaaaaaaaa

SEQ ID NO: 1378 - DNA, 155 bp, Homo sapiens
  source 1..155: mol_type = other DNA
aaaagcatctcagcctaccatgagaataagagaaagaaaatgaagatcaaaagcttattcatctgtttttctttttcgttggtgtaaagccaacaccctgtctaaaaaacataaatttctttaatcattttgcctcttttctctgtgcttcaatt

SEQ ID NO: 1379 - DNA, 110 bp, Homo sapiens
  source 1..110: mol_type = other DNA
catcacatttaaaagcatctcagcctaccatgagaataagagaaagaaaatgaagatcaaaagcttattcatctgtttttctttttcgttggtgtaaagccaacaccctg

SEQ ID NO: 1380 - DNA, 110 bp, Homo sapiens
  source 1..110: mol_type = other DNA
aaaagcatctcagcctaccatgagaataagagaaagaaaatgaagatcaaaagcttattcatctgtttttctttttcgttggtgtaaagccaacaccctgtctaaaaaac

SEQ ID NO: 1381 - DNA, 110 bp, Homo sapiens
  source 1..110: mol_type = other DNA
cagcctaccatgagaataagagaaagaaaatgaagatcaaaagcttattcatctgtttttctttttcgttggtgtaaagccaacaccctgtctaaaaaacataaatttct

SEQ ID NO: 1382 - DNA, 110 bp, Homo sapiens
  source 1..110: mol_type = other DNA
tgagaataagagaaagaaaatgaagatcaaaagcttattcatctgtttttctttttcgttggtgtaaagccaacaccctgtctaaaaaacataaatttctttaatcattt

SEQ ID NO: 1383 - DNA, 110 bp, Homo sapiens
  source 1..110: mol_type = other DNA
agaaagaaaatgaagatcaaaagcttattcatctgtttttctttttcgttggtgtaaagccaacaccctgtctaaaaaacataaatttctttaatcattttgcctctttt

SEQ ID NO: 1384 - DNA, 110 bp, Homo sapiens
  source 1..110: mol_type = other DNA
tgaagatcaaaagcttattcatctgtttttctttttcgttggtgtaaagccaacaccctgtctaaaaaacataaatttctttaatcattttgcctcttttctctgtgctt

SEQ ID NO: 1385 - DNA, 110 bp, Homo sapiens
  source 1..110: mol_type = other DNA
aagcttattcatctgtttttctttttcgttggtgtaaagccaacaccctgtctaaaaaacataaatttctttaatcattttgcctcttttctctgtgcttcaattaataa

SEQ ID NO: 1386 - DNA, 110 bp, Homo sapiens
  source 1..110: mol_type = other DNA
atctgtttttctttttcgttggtgtaaagccaacaccctgtctaaaaaacataaatttctttaatcattttgcctcttttctctgtgcttcaattaataaaaaatggaaa

SEQ ID NO: 1387 - DNA, 151 bp, Homo sapiens
  source 1..151: mol_type = other DNA
cagcctaccatgagaataagagaaagaaaatgaagatcaaaagcttattcatctgtttttctttttcgttggtgtaaagccaacaccctgtctaaaaaacataaatttctttaatcattttgcctcttttctctgtgcttcaattaataaa

SEQ ID NO: 1388 - DNA, 121 bp, Homo sapiens
  source 1..121: mol_type = other DNA
tgaagatcaaaagcttattcatctgtttttctttttcgttggtgtaaagccaacaccctgtctaaaaaacataaatttctttaatcattttgcctcttttctctgtgcttcaattaataaa

SEQ ID NO: 1389 - DNA, 91 bp, Homo sapiens
  source 1..91: mol_type = other DNA
ctttttcgttggtgtaaagccaacaccctgtctaaaaaacataaatttctttaatcattttgcctcttttctctgtgcttcaattaataaa

SEQ ID NO: 1390 - DNA, 60 bp, Homo sapiens
  source 1..60: mol_type = other DNA
aagcttattcatctgtttttctttttcgttggtgtaaagccaacaccctgtctaaaaaac

SEQ ID NO: 1391-1398 - skipped (8 entries)

SEQ ID NO: 1399 - RNA, 16 nt, synthetic construct
  misc_feature 1..16: note = Sequence according to formula (Ig)
  misc_feature 1: note = n is a, u, t, g, and c, or a nucleotide analogue thereof
  misc_feature 8: note = n is a, u, t, g, and c, or a nucleotide analogue thereof
  misc_feature 16: note = n is a, u, t, g, and c, or a nucleotide analogue thereof
  source 1..16: mol_type = other RNA
nghyyydnthabrdcn

SEQ ID NO: 1400 - RNA, 26 nt, synthetic construct
  misc_feature 1..26: note = Sequence according to formula (IIg)
  misc_feature 1..2: note = n is a, u, t, g, and c, or a nucleotide analogue thereof; may be present or not
  misc_feature 4..6: note = n is a, u, t, g, and c, or a nucleotide analogue thereof
  misc_feature 13: note = n is a, u, t, g, and c, or a nucleotide analogue thereof
  misc_feature 21..23: note = n is a, u, t, g, and c, or a nucleotide analogue thereof
  misc_feature 24..25: note = n is a, u, t, g, and c, or a nucleotide analogue thereof; may be present or not
  misc_feature 26: note = may be present or not
  source 1..26: mol_type = other RNA
nnhnnnghyyydnthabrdcnnnnnh

SEQ ID NO: 1401 - RNA, 16 nt, synthetic construct
  misc_feature 1..16: note = Sequence according to formula (Ih)
  source 1..16: mol_type = other RNA
dghyctdythasrrcc

SEQ ID NO: 1402 - RNA, 26 nt, synthetic construct
  misc_feature 1..26: note = Sequence according to formula (IIh)
  misc_feature 1: note = n is a, u, t, g, and c, or a nucleotide analogue thereof; may be present or not
  misc_feature 2: note = may be present or not
  misc_feature 25: note = n is a, u, t, g, and c, or a nucleotide analogue thereof; may be present or not
  misc_feature 26: note = may be present or not
  source 1..26: mol_type = other RNA
nhaahdghyctdythasrrccvhbnh

SEQ ID NO: 1403 - DNA, 16 bp, synthetic construct
  misc_feature 1..16: note = Sequence according to formula (Ic)
  source 1..16: mol_type = other DNA
vgyyyyhhthrvvrcb

SEQ ID NO: 1404 - DNA, 16 bp, synthetic construct
  misc_feature 1..16: note = Sequence according to formula (Ic)
  source 1..16: mol_type = other DNA
sgyyyttytmarrrcs

SEQ ID NO: 1405 - DNA, 16 bp, synthetic construct
  misc_feature 1..16: note = Sequence according to formula (Ic)
  source 1..16: mol_type = other DNA
sgyycttttmagrrcs

SEQ ID NO: 1406 - skipped

SEQ ID NO: 1407 - DNA, 16 bp, synthetic construct
  misc_feature 1..16: note = Sequence according to formula (Ie)
  misc_feature 3..5: note = n is a, u, t, g, and c, or a nucleotide analogue thereof
  misc_feature 13..14: note = n is a, u, t, g, and c, or a nucleotide analogue thereof
  source 1..16: mol_type = other DNA
rgnnnyhbthrdnncy

SEQ ID NO: 1408 - DNA, 16 bp, synthetic construct
  misc_feature 1..16: note = Sequence according to formula (Ie)
  misc_feature 3: note = n is a, u, t, g, and c, or a nucleotide analogue thereof
  misc_feature 14: note = n is a, u, t, g, and c, or a nucleotide analogue thereof
  source 1..16: mol_type = other DNA
rgndbyhythrdhncy

SEQ ID NO: 1409 - DNA, 16 bp, synthetic construct
  misc_feature 1..16: note = Sequence according to formula (If)
  source 1..16: mol_type = other DNA
vgyyytyhthrvrrcb

SEQ ID NO: 1410 - DNA, 16 bp, synthetic construct
  misc_feature 1..16: note = Sequence according to formula (If)
  source 1..16: mol_type = other DNA
sgyycttytmagrrcs

SEQ ID NO: 1411 - DNA, 16 bp, synthetic construct
  misc_feature 1..16: note = Sequence according to formula (If)
  source 1..16: mol_type = other DNA
sgyycttttmagrrcs

SEQ ID NO: 1412 - DNA, 16 bp, synthetic construct
  misc_feature 1..16: note = Sequence according to formula (Ig)
  source 1..16: mol_type = other DNA
ggyycttythagrrcc

SEQ ID NO: 1413 - DNA, 16 bp, synthetic construct
  misc_feature 1..16: note = Sequence according to formula (Ig)
  source 1..16: mol_type = other DNA
ggcycttytmagrgcc

SEQ ID NO: 1414 - DNA, 16 bp, synthetic construct
  misc_feature 1..16: note = Sequence according to formula (Ig)
  source 1..16: mol_type = other DNA
ggctcttttmagrgcc

SEQ ID NO: 1415 - DNA, 16 bp, synthetic construct
  misc_feature 1..16: note = Sequence according to formula (Ih)
  source 1..16: mol_type = other DNA
dghyctdythasrrcc

SEQ ID NO: 1416 - DNA, 16 bp, synthetic construct
  misc_feature 1..16: note = Sequence according to formula (Ih)
  source 1..16: mol_type = other DNA
ggcyctttthagrgcc

SEQ ID NO: 1417 - DNA, 16 bp, synthetic construct
  misc_feature 1..16: note = Sequence according to formula (Ih)
  source 1..16: mol_type = other DNA
ggcycttttmagrgcc

SEQ ID NO: 1418 - DNA, 26 bp, synthetic construct
  misc_feature 1..26: note = Sequence according to formula (IIc)
  misc_feature 1..2: note = may be present or not
  misc_feature 25..26: note = n is a, u, t, g, and c, or a nucleotide analogue thereof; may be present or not
  source 1..26: mol_type = other DNA
hhhhvvgyyyyhhthrvvrcbvhhnn

SEQ ID NO: 1419 - DNA, 26 bp, synthetic construct
  misc_feature 1..26: note = Sequence according to formula (IIc)
  misc_feature 1..2: note = may be present or not
  misc_feature 25..26: note = may be present or not
  source 1..26: mol_type = other DNA
mhmhmsgyyyttytmarrrcsmchhh

SEQ ID NO: 1420 - DNA, 26 bp, synthetic construct
  misc_feature 1..26: note = Sequence according to formula (IIc)
  misc_feature 1..2: note = may be present or not
  misc_feature 25..26: note = may be present or not
  source 1..26: mol_type = other DNA
mmmmmsgyycttttmagrrcsachmh

SEQ ID NO: 1421 - skipped

SEQ ID NO: 1422 - DNA, 26 bp, synthetic construct
  misc_feature 1..26: note = Sequence according to formula (IIe)
  misc_feature 1: note = n is a, u, t, g, and c, or a nucleotide analogue thereof; may be present or not
  misc_feature 2: note = n is a, u, t, g, and c, or a nucleotide analogue thereof; may be present or not
  misc_feature 5: note = n is a, u, t, g, and c, or a nucleotide analogue thereof
  misc_feature 8..10: note = n is a, u, t, g, and c, or a nucleotide analogue thereof
  misc_feature 18..19: note = n is a, u, t, g, and c, or a nucleotide analogue thereof
  misc_feature 24: note = may be present or not
  misc_feature 25..26: note = n is a, u, t, g, and c, or a nucleotide analogue thereof; may be present or not
  source 1..26: mol_type = other DNA
nnhhnrgnnnyhbthrdnncydhhnn

SEQ ID NO: 1423 - DNA, 26 bp, synthetic construct
  misc_feature 1..26: note = Sequence according to formula (IIe)
  misc_feature 1: note = n is a, u, t, g, and c, or a nucleotide analogue thereof; may be present or not
  misc_feature 2: note = may be present or not
  misc_feature 8: note = n is a, u, t, g, and c, or a nucleotide analogue thereof
  misc_feature 19: note = n is a, u, t, g, and c, or a nucleotide analogue thereof
  misc_feature 24..26: note = may be present or not
  source 1..26: mol_type = other DNA
nhhhvrgndbyhythrdhncyrhhhh

SEQ ID NO: 1424 - DNA, 26 bp, synthetic construct
  misc_feature 1..26: note = Sequence according to formula (IIf)
  misc_feature 1..2: note = may be present or not
  misc_feature 25: note = may be present or not
  misc_feature 26: note = n is a, u, t, g, and c, or a nucleotide analogue thereof; may be present or not
  source 1..26: mol_type = other DNA
hhmhmvgyyytyhthrvrrcbvmhhn

SEQ ID NO: 1425 - DNA, 26 bp, synthetic construct
  misc_feature 1..26: note = Sequence according to formula (IIf)
  misc_feature 1..2: note = may be present or not
  misc_feature 25..26: note = may be present or not
  source 1..26: mol_type = other DNA
mmmmmsgyycttytmagrrcsmchhh

SEQ ID NO: 1426 - DNA, 26 bp, synthetic construct
  misc_feature 1..26: note = Sequence according to formula (IIf)
  misc_feature 1..2: note = may be present or not
  misc_feature 25..26: note = may be present or not
  source 1..26: mol_type = other DNA
mmmmmsgyycttttmagrrcsachmh

SEQ ID NO: 1427 - DNA, 26 bp, synthetic construct
  misc_feature 1..26: note = Sequence according to formula (IIg)
  misc_feature 1..2: note = may be present or not
  misc_feature 24..25: note = n is a, u, t, g, and c, or a nucleotide analogue thereof; may be present or not
  misc_feature 26: note = may be present or not
  source 1..26: mol_type = other DNA
hhmamggyycttythagrrccvhnnm

SEQ ID NO: 1428 - DNA, 26 bp, synthetic construct
  misc_feature 1..26: note = Sequence according to formula (IIg)
  misc_feature 1..2: note = may be present or not
  misc_feature 25..26: note = may be present or not
  source 1..26: mol_type = other DNA
hhaamggcycttytmagrgccvchhm

SEQ ID NO: 1429 - DNA, 26 bp, synthetic construct
  misc_feature 1..26: note = Sequence according to formula (IIg)
  misc_feature 1..2: note = may be present or not
  misc_feature 24..26: note = may be present or not
  source 1..26: mol_type = other DNA
mmaamggctcttttmagrgccmcymm

SEQ ID NO: 1430 - DNA, 26 bp, synthetic construct
  misc_feature 1..26: note = Sequence according to formula (IIh)
  misc_feature 1: note = n is a, u, t, g, and c, or a nucleotide analogue thereof; may be present or not
  misc_feature 2: note = may be present or not
  misc_feature 24: note = may be present or not
  misc_feature 25: note = n is a, u, t, g, and c, or a nucleotide analogue thereof; may be present or not
  misc_feature 26: note = may be present or not
  source 1..26: mol_type = other DNA
nhaahdghyctdythasrrccvhbnh

SEQ ID NO: 1431 - DNA, 26 bp, synthetic construct
  misc_feature 1..26: note = Sequence according to formula (IIh)
  misc_feature 1..2: note = may be present or not
  misc_feature 24: note = may be present or not
  misc_feature 25: note = n is a, u, t, g, and c, or a nucleotide analogue thereof; may be present or not
  misc_feature 26: note = may be present or not
  source 1..26: mol_type = other DNA
hhaamggcyctttthagrgccvmynm

SEQ ID NO: 1432 - DNA, 26 bp, synthetic construct
  misc_feature 1..26: note = Sequence according to formula (IIh)
  misc_feature 1..2: note = may be present or not
  misc_feature 24..26: note = may be present or not
  source 1..26: mol_type = other DNA
hmaaaggcycttttmagrgccrmyhm

SEQ ID NO: 1433 - DNA, 24 bp, synthetic construct
  misc_feature 1..24: note = Specific histone stem-loop sequence
  source 1..24: mol_type = other DNA
caaaggctcttttcagagccacca

SEQ ID NO: 1434 - DNA, 44 bp, Homo sapiens
  source 1..44: mol_type = other DNA
gcccgatgggcctcccaacgggccctcctcccctccttgcaccg

SEQ ID NO: 1435 - DNA, 75 bp, Homo sapiens
  source 1..75: mol_type = other DNA
tagtttctcctctcgaacgccaggtggagcaaccggccggataccgccacagccctggcaggcggcgctgtgatg

SEQ ID NO: 1436 - DNA, 2027 bp, synthetic construct
  misc_feature 1..2027: note = RPL35 PpLuc(GC) albumin7 A64 C30 histoneSL
  source 1..2027: mol_type = other DNA
ggggagcgggcggcggcgttggcggcttgtgcagcaaagcttgaggatggaggacgccaagaacatcaagaagggcccggcgcccttctacccgctggaggacgggaccgccggcgagcagctccacaaggccatgaagcggtacgccctggtgccgggcacgatcgccttcaccgacgcccacatcgaggtcgacatcacctacgcggagtacttcgagatgagcgtgcgcctggccgaggccatgaagcggtacggcctgaacaccaaccaccggatcgtggtgtgctcggagaacagcctgcagttcttcatgccggtgctgggcgccctcttcatcggcgtggccgtcgccccggcgaacgacatctacaacgagcgggagctgctgaacagcatggggatcagccagccgaccgtggtgttcgtgagcaagaagggcctgcagaagatcctgaacgtgcagaagaagctgcccatcatccagaagatcatcatcatggacagcaagaccgactaccagggcttccagtcgatgtacacgttcgtgaccagccacctcccgccgggcttcaacgagtacgacttcgtcccggagagcttcgaccgggacaagaccatcgccctgatcatgaacagcagcggcagcaccggcctgccgaagggggtggccctgccgcaccggaccgcctgcgtgcgcttctcgcacgcccgggaccccatcttcggcaaccagatcatcccggacaccgccatcctgagcgtggtgccgttccaccacggcttcggcatgttcacgaccctgggctacctcatctgcggcttccgggtggtcctgatgtaccggttcgaggaggagctgttcctgcggagcctgcaggactacaagatccagagcgcgctgctcgtgccgaccctgttcagcttcttcgccaagagcaccctgatcgacaagtacgacctgtcgaacctgcacgagatcgccagcgggggcgccccgctgagcaaggaggtgggcgaggccgtggccaagcggttccacctcccgggcatccgccagggctacggcctgaccgagaccacgagcgcgatcctgatcacccccgagggggacgacaagccgggcgccgtgggcaaggtggtcccgttcttcgaggccaaggtggtggacctggacaccggcaagaccctgggcgtgaaccagcggggcgagctgtgcgtgcgggggccgatgatcatgagcggctacgtgaacaacccggaggccaccaacgccctcatcgacaaggacggctggctgcacagcggcgacatcgcctactgggacgaggacgagcacttcttcatcgtcgaccggctgaagtcgctgatcaagtacaagggctaccaggtggcgccggccgagctggagagcatcctgctccagcaccccaacatcttcgacgccggcgtggccgggctgccggacgacgacgccggcgagctgccggccgcggtggtggtgctggagcacggcaagaccatgacggagaaggagatcgtcgactacgtggccagccaggtgaccaccgccaagaagctgcggggcggcgtggtgttcgtggacgaggtcccgaagggcctgaccgggaagctcgacgcccggaagatccgcgagatcctgatcaaggccaagaagggcggcaagatcgccgtgtaagactagtgcatcacatttaaaagcatctcagcctaccatgagaataagagaaagaaaatgaagatcaatagcttattcatctctttttctttttcgttggtgtaaagccaacaccctgtctaaaaaacataaatttctttaatcattttgcctcttttctctgtgcttcaattaataaaaaatggaaagaacctagatctaaaaaaaaaaaaaaaaaaaaaaaaaaaaaaaaaaaaaaaaaaaaaaaaaaaaaaaaaaaaaaaatgcatcccccccccccccccccccccccccccccccaaaggctcttttcagagccaccagaatt

SEQ ID NO: 1437 - DNA, 2027 bp, synthetic construct
  misc_feature 1..2027: note = RPL21 PpLuc(GC) albumin7 A64 C30 histoneSL
  source 1..2027: mol_type = other DNA
ggggccggaaccgccatcttccagtaattcgccaaaaagcttgaggatggaggacgccaagaacatcaagaagggcccggcgcccttctacccgctggaggacgggaccgccggcgagcagctccacaaggccatgaagcggtacgccctggtgccgggcacgatcgccttcaccgacgcccacatcgaggtcgacatcacctacgcggagtacttcgagatgagcgtgcgcctggccgaggccatgaagcggtacggcctgaacaccaaccaccggatcgtggtgtgctcggagaacagcctgcagttcttcatgccggtgctgggcgccctcttcatcggcgtggccgtcgccccggcgaacgacatctacaacgagcgggagctgctgaacagcatggggatcagccagccgaccgtggtgttcgtgagcaagaagggcctgcagaagatcctgaacgtgcagaagaagctgcccatcatccagaagatcatcatcatggacagcaagaccgactaccagggcttccagtcgatgtacacgttcgtgaccagccacctcccgccgggcttcaacgagtacgacttcgtcccggagagcttcgaccgggacaagaccatcgccctgatcatgaacagcagcggcagcaccggcctgccgaagggggtggccctgccgcaccggaccgcctgcgtgcgcttctcgcacgcccgggaccccatcttcggcaaccagatcatcccggacaccgccatcctgagcgtggtgccgttccaccacggcttcggcatgttcacgaccctgggctacctcatctgcggcttccgggtggtcctgatgtaccggttcgaggaggagctgttcctgcggagcctgcaggactacaagatccagagcgcgctgctcgtgccgaccctgttcagcttcttcgccaagagcaccctgatcgacaagtacgacctgtcgaacctgcacgagatcgccagcgggggcgccccgctgagcaaggaggtgggcgaggccgtggccaagcggttccacctcccgggcatccgccagggctacggcctgaccgagaccacgagcgcgatcctgatcacccccgagggggacgacaagccgggcgccgtgggcaaggtggtcccgttcttcgaggccaaggtggtggacctggacaccggcaagaccctgggcgtgaaccagcggggcgagctgtgcgtgcgggggccgatgatcatgagcggctacgtgaacaacccggaggccaccaacgccctcatcgacaaggacggctggctgcacagcggcgacatcgcctactgggacgaggacgagcacttcttcatcgtcgaccggctgaagtcgctgatcaagtacaagggctaccaggtggcgccggccgagctggagagcatcctgctccagcaccccaacatcttcgacgccggcgtggccgggctgccggacgacgacgccggcgagctgccggccgcggtggtggtgctggagcacggcaagaccatgacggagaaggagatcgtcgactacgtggccagccaggtgaccaccgccaagaagctgcggggcggcgtggtgttcgtggacgaggtcccgaagggcctgaccgggaagctcgacgcccggaagatccgcgagatcctgatcaaggccaagaagggcggcaagatcgccgtgtaagactagtgcatcacatttaaaagcatctcagcctaccatgagaataagagaaagaaaatgaagatcaatagcttattcatctctttttctttttcgttggtgtaaagccaacaccctgtctaaaaaacataaatttctttaatcattttgcctcttttctctgtgcttcaattaataaaaaatggaaagaacctagatctaaaaaaaaaaaaaaaaaaaaaaaaaaaaaaaaaaaaaaaaaaaaaaaaaaaaaaaaaaaaaaaatgcatcccccccccccccccccccccccccccccccaaaggctcttttcagagccaccagaatt

SEQ ID NO: 1438 - DNA, 2068 bp, synthetic construct
  misc_feature 1..2068: note = ATP5A1 PpLuc(GC) albumin7 A64 C30 histoneSL
  source 1..2068: mol_type = other DNA
gggcggctcggccattttgtcccagtcagtccggaggctgcggctgcagaagtaccgcctgcggagtaactgcaaagaagcttgaggatggaggacgccaagaacatcaagaagggcccggcgcccttctacccgctggaggacgggaccgccggcgagcagctccacaaggccatgaagcggtacgccctggtgccgggcacgatcgccttcaccgacgcccacatcgaggtcgacatcacctacgcggagtacttcgagatgagcgtgcgcctggccgaggccatgaagcggtacggcctgaacaccaaccaccggatcgtggtgtgctcggagaacagcctgcagttcttcatgccggtgctgggcgccctcttcatcggcgtggccgtcgccccggcgaacgacatctacaacgagcgggagctgctgaacagcatggggatcagccagccgaccgtggtgttcgtgagcaagaagggcctgcagaagatcctgaacgtgcagaagaagctgcccatcatccagaagatcatcatcatggacagcaagaccgactaccagggcttccagtcgatgtacacgttcgtgaccagccacctcccgccgggcttcaacgagtacgacttcgtcccggagagcttcgaccgggacaagaccatcgccctgatcatgaacagcagcggcagcaccggcctgccgaagggggtggccctgccgcaccggaccgcctgcgtgcgcttctcgcacgcccgggaccccatcttcggcaaccagatcatcccggacaccgccatcctgagcgtggtgccgttccaccacggcttcggcatgttcacgaccctgggctacctcatctgcggcttccgggtggtcctgatgtaccggttcgaggaggagctgttcctgcggagcctgcaggactacaagatccagagcgcgctgctcgtgccgaccctgttcagcttcttcgccaagagcaccctgatcgacaagtacgacctgtcgaacctgcacgagatcgccagcgggggcgccccgctgagcaaggaggtgggcgaggccgtggccaagcggttccacctcccgggcatccgccagggctacggcctgaccgagaccacgagcgcgatcctgatcacccccgagggggacgacaagccgggcgccgtgggcaaggtggtcccgttcttcgaggccaaggtggtggacctggacaccggcaagaccctgggcgtgaaccagcggggcgagctgtgcgtgcgggggccgatgatcatgagcggctacgtgaacaacccggaggccaccaacgccctcatcgacaaggacggctggctgcacagcggcgacatcgcctactgggacgaggacgagcacttcttcatcgtcgaccggctgaagtcgctgatcaagtacaagggctaccaggtggcgccggccgagctggagagcatcctgctccagcaccccaacatcttcgacgccggcgtggccgggctgccggacgacgacgccggcgagctgccggccgcggtggtggtgctggagcacggcaagaccatgacggagaaggagatcgtcgactacgtggccagccaggtgaccaccgccaagaagctgcggggcggcgtggtgttcgtggacgaggtcccgaagggcctgaccgggaagctcgacgcccggaagatccgcgagatcctgatcaaggccaagaagggcggcaagatcgccgtgtaagactagtgcatcacatttaaaagcatctcagcctaccatgagaataagagaaagaaaatgaagatcaatagcttattcatctctttttctttttcgttggtgtaaagccaacaccctgtctaaaaaacataaatttctttaatcattttgcctcttttctctgtgcttcaattaataaaaaatggaaagaacctagatctaaaaaaaaaaaaaaaaaaaaaaaaaaaaaaaaaaaaaaaaaaaaaaaaaaaaaaaaaaaaaaaatgcatcccccccccccccccccccccccccccccccaaaggctcttttcagagccaccagaatt

SEQ ID NO: 1439 - DNA, 2055 bp, synthetic construct
  misc_feature 1..2055: note = HSD17B4 PpLuc(GC) albumin7 A64 C30 histoneSL
  source 1..2055: mol_type = other DNA
gggtcccgcagtcggcgtccagcggctctgcttgttcgtgtgtgtgtcgttgcaggccttattcaagcttgaggatggaggacgccaagaacatcaagaagggcccggcgcccttctacccgctggaggacgggaccgccggcgagcagctccacaaggccatgaagcggtacgccctggtgccgggcacgatcgccttcaccgacgcccacatcgaggtcgacatcacctacgcggagtacttcgagatgagcgtgcgcctggccgaggccatgaagcggtacggcctgaacaccaaccaccggatcgtggtgtgctcggagaacagcctgcagttcttcatgccggtgctgggcgccctcttcatcggcgtggccgtcgccccggcgaacgacatctacaacgagcgggagctgctgaacagcatggggatcagccagccgaccgtggtgttcgtgagcaagaagggcctgcagaagatcctgaacgtgcagaagaagctgcccatcatccagaagatcatcatcatggacagcaagaccgactaccagggcttccagtcgatgtacacgttcgtgaccagccacctcccgccgggcttcaacgagtacgacttcgtcccggagagcttcgaccgggacaagaccatcgccctgatcatgaacagcagcggcagcaccggcctgccgaagggggtggccctgccgcaccggaccgcctgcgtgcgcttctcgcacgcccgggaccccatcttcggcaaccagatcatcccggacaccgccatcctgagcgtggtgccgttccaccacggcttcggcatgttcacgaccctgggctacctcatctgcggcttccgggtggtcctgatgtaccggttcgaggaggagctgttcctgcggagcctgcaggactacaagatccagagcgcgctgctcgtgccgaccctgttcagcttcttcgccaagagcaccctgatcgacaagtacgacctgtcgaacctgcacgagatcgccagcgggggcgccccgctgagcaaggaggtgggcgaggccgtggccaagcggttccacctcccgggcatccgccagggctacggcctgaccgagaccacgagcgcgatcctgatcacccccgagggggacgacaagccgggcgccgtgggcaaggtggtcccgttcttcgaggccaaggtggtggacctggacaccggcaagaccctgggcgtgaaccagcggggcgagctgtgcgtgcgggggccgatgatcatgagcggctacgtgaacaacccggaggccaccaacgccctcatcgacaaggacggctggctgcacagcggcgacatcgcctactgggacgaggacgagcacttcttcatcgtcgaccggctgaagtcgctgatcaagtacaagggctaccaggtggcgccggccgagctggagagcatcctgctccagcaccccaacatcttcgacgccggcgtggccgggctgccggacgacgacgccggcgagctgccggccgcggtggtggtgctggagcacggcaagaccatgacggagaaggagatcgtcgactacgtggccagccaggtgaccaccgccaagaagctgcggggcggcgtggtgttcgtggacgaggtcccgaagggcctgaccgggaagctcgacgcccggaagatccgcgagatcctgatcaaggccaagaagggcggcaagatcgccgtgtaagactagtgcatcacatttaaaagcatctcagcctaccatgagaataagagaaagaaaatgaagatcaatagcttattcatctctttttctttttcgttggtgtaaagccaacaccctgtctaaaaaacataaatttctttaatcattttgcctcttttctctgtgcttcaattaataaaaaatggaaagaacctagatctaaaaaaaaaaaaaaaaaaaaaaaaaaaaaaaaaaaaaaaaaaaaaaaaaaaaaaaaaaaaaaaatgcatcccccccccccccccccccccccccccccccaaaggctcttttcagagccaccagaatt

SEQ ID NO: 1440 - DNA, 2024 bp, synthetic construct
  misc_feature 1..2024: note = AIG1 PpLuc(GC) albumin7 A64 C30 histoneSL
  source 1..2024: mol_type = other DNA
gggccgcccagccggtccaggcctctggcgaacaagcttgaggatggaggacgccaagaacatcaagaagggcccggcgcccttctacccgctggaggacgggaccgccggcgagcagctccacaaggccatgaagcggtacgccctggtgccgggcacgatcgccttcaccgacgcccacatcgaggtcgacatcacctacgcggagtacttcgagatgagcgtgcgcctggccgaggccatgaagcggtacggcctgaacaccaaccaccggatcgtggtgtgctcggagaacagcctgcagttcttcatgccggtgctgggcgccctcttcatcggcgtggccgtcgccccggcgaacgacatctacaacgagcgggagctgctgaacagcatggggatcagccagccgaccgtggtgttcgtgagcaagaagggcctgcagaagatcctgaacgtgcagaagaagctgcccatcatccagaagatcatcatcatggacagcaagaccgactaccagggcttccagtcgatgtacacgttcgtgaccagccacctcccgccgggcttcaacgagtacgacttcgtcccggagagcttcgaccgggacaagaccatcgccctgatcatgaacagcagcggcagcaccggcctgccgaagggggtggccctgccgcaccggaccgcctgcgtgcgcttctcgcacgcccgggaccccatcttcggcaaccagatcatcccggacaccgccatcctgagcgtggtgccgttccaccacggcttcggcatgttcacgaccctgggctacctcatctgcggcttccgggtggtcctgatgtaccggttcgaggaggagctgttcctgcggagcctgcaggactacaagatccagagcgcgctgctcgtgccgaccctgttcagcttcttcgccaagagcaccctgatcgacaagtacgacctgtcgaacctgcacgagatcgccagcgggggcgccccgctgagcaaggaggtgggcgaggccgtggccaagcggttccacctcccgggcatccgccagggctacggcctgaccgagaccacgagcgcgatcctgatcacccccgagggggacgacaagccgggcgccgtgggcaaggtggtcccgttcttcgaggccaaggtggtggacctggacaccggcaagaccctgggcgtgaaccagcggggcgagctgtgcgtgcgggggccgatgatcatgagcggctacgtgaacaacccggaggccaccaacgccctcatcgacaaggacggctggctgcacagcggcgacatcgcctactgggacgaggacgagcacttcttcatcgtcgaccggctgaagtcgctgatcaagtacaagggctaccaggtggcgccggccgagctggagagcatcctgctccagcaccccaacatcttcgacgccggcgtggccgggctgccggacgacgacgccggcgagctgccggccgcggtggtggtgctggagcacggcaagaccatgacggagaaggagatcgtcgactacgtggccagccaggtgaccaccgccaagaagctgcggggcggcgtggtgttcgtggacgaggtcccgaagggcctgaccgggaagctcgacgcccggaagatccgcgagatcctgatcaaggccaagaagggcggcaagatcgccgtgtaagactagtgcatcacatttaaaagcatctcagcctaccatgagaataagagaaagaaaatgaagatcaatagcttattcatctctttttctttttcgttggtgtaaagccaacaccctgtctaaaaaacataaatttctttaatcattttgcctcttttctctgtgcttcaattaataaaaaatggaaagaacctagatctaaaaaaaaaaaaaaaaaaaaaaaaaaaaaaaaaaaaaaaaaaaaaaaaaaaaaaaaaaaaaaaatgcatcccccccccccccccccccccccccccccccaaaggctcttttcagagccaccagaatt

SEQ ID NO: 1441 - DNA, 2049 bp, synthetic construct
  misc_feature 1..2049: note = COX6C PpLuc(GC) albumin7 A64 C30 histoneSL
  source 1..2049: mol_type = other DNA
ggagtcaggaaggacgttggtgttgaggttagcatacgtatcaaggacagtaactaccaagcttgaggatggaggacgccaagaacatcaagaagggcccggcgcccttctacccgctggaggacgggaccgccggcgagcagctccacaaggccatgaagcggtacgccctggtgccgggcacgatcgccttcaccgacgcccacatcgaggtcgacatcacctacgcggagtacttcgagatgagcgtgcgcctggccgaggccatgaagcggtacggcctgaacaccaaccaccggatcgtggtgtgctcggagaacagcctgcagttcttcatgccggtgctgggcgccctcttcatcggcgtggccgtcgccccggcgaacgacatctacaacgagcgggagctgctgaacagcatggggatcagccagccgaccgtggtgttcgtgagcaagaagggcctgcagaagatcctgaacgtgcagaagaagctgcccatcatccagaagatcatcatcatggacagcaagaccgactaccagggcttccagtcgatgtacacgttcgtgaccagccacctcccgccgggcttcaacgagtacgacttcgtcccggagagcttcgaccgggacaagaccatcgccctgatcatgaacagcagcggcagcaccggcctgccgaagggggtggccctgccgcaccggaccgcctgcgtgcgcttctcgcacgcccgggaccccatcttcggcaaccagatcatcccggacaccgccatcctgagcgtggtgccgttccaccacggcttcggcatgttcacgaccctgggctacctcatctgcggcttccgggtggtcctgatgtaccggttcgaggaggagctgttcctgcggagcctgcaggactacaagatccagagcgcgctgctcgtgccgaccctgttcagcttcttcgccaagagcaccctgatcgacaagtacgacctgtcgaacctgcacgagatcgccagcgggggcgccccgctgagcaaggaggtgggcgaggccgtggccaagcggttccacctcccgggcatccgccagggctacggcctgaccgagaccacgagcgcgatcctgatcacccccgagggggacgacaagccgggcgccgtgggcaaggtggtcccgttcttcgaggccaaggtggtggacctggacaccggcaagaccctgggcgtgaaccagcggggcgagctgtgcgtgcgggggccgatgatcatgagcggctacgtgaacaacccggaggccaccaacgccctcatcgacaaggacggctggctgcacagcggcgacatcgcctactgggacgaggacgagcacttcttcatcgtcgaccggctgaagtcgctgatcaagtacaagggctaccaggtggcgccggccgagctggagagcatcctgctccagcaccccaacatcttcgacgccggcgtggccgggctgccggacgacgacgccggcgagctgccggccgcggtggtggtgctggagcacggcaagaccatgacggagaaggagatcgtcgactacgtggccagccaggtgaccaccgccaagaagctgcggggcggcgtggtgttcgtggacgaggtcccgaagggcctgaccgggaagctcgacgcccggaagatccgcgagatcctgatcaaggccaagaagggcggcaagatcgccgtgtaagactagtgcatcacatttaaaagcatctcagcctaccatgagaataagagaaagaaaatgaagatcaatagcttattcatctctttttctttttcgttggtgtaaagccaacaccctgtctaaaaaacataaatttctttaatcattttgcctcttttctctgtgcttcaattaataaaaaatggaaagaacctagatctaaaaaaaaaaaaaaaaaaaaaaaaaaaaaaaaaaaaaaaaaaaaaaaaaaaaaaaaaaaaaaaatgcatcccccccccccccccccccccccccccccccaaaggctcttttcagagccaccagaatt

SEQ ID NO: 1442 - DNA, 2035 bp, synthetic construct
  misc_feature 1..2035: note = ASAH1 PpLuc(GC) albumin7 A64 C30 histoneSL
  source 1..2035: mol_type = other DNA
gggcctctgctggagtccggggagtggcgttggctgctagagcgaagcttgaggatggaggacgccaagaacatcaagaagggcccggcgcccttctacccgctggaggacgggaccgccggcgagcagctccacaaggccatgaagcggtacgccctggtgccgggcacgatcgccttcaccgacgcccacatcgaggtcgacatcacctacgcggagtacttcgagatgagcgtgcgcctggccgaggccatgaagcggtacggcctgaacaccaaccaccggatcgtggtgtgctcggagaacagcctgcagttcttcatgccggtgctgggcgccctcttcatcggcgtggccgtcgccccggcgaacgacatctacaacgagcgggagctgctgaacagcatggggatcagccagccgaccgtggtgttcgtgagcaagaagggcctgcagaagatcctgaacgtgcagaagaagctgcccatcatccagaagatcatcatcatggacagcaagaccgactaccagggcttccagtcgatgtacacgttcgtgaccagccacctcccgccgggcttcaacgagtacgacttcgtcccggagagcttcgaccgggacaagaccatcgccctgatcatgaacagcagcggcagcaccggcctgccgaagggggtggccctgccgcaccggaccgcctgcgtgcgcttctcgcacgcccgggaccccatcttcggcaaccagatcatcccggacaccgccatcctgagcgtggtgccgttccaccacggcttcggcatgttcacgaccctgggctacctcatctgcggcttccgggtggtcctgatgtaccggttcgaggaggagctgttcctgcggagcctgcaggactacaagatccagagcgcgctgctcgtgccgaccctgttcagcttcttcgccaagagcaccctgatcgacaagtacgacctgtcgaacctgcacgagatcgccagcgggggcgccccgctgagcaaggaggtgggcgaggccgtggccaagcggttccacctcccgggcatccgccagggctacggcctgaccgagaccacgagcgcgatcctgatcacccccgagggggacgacaagccgggcgccgtgggcaaggtggtcccgttcttcgaggccaaggtggtggacctggacaccggcaagaccctgggcgtgaaccagcggggcgagctgtgcgtgcgggggccgatgatcatgagcggctacgtgaacaacccggaggccaccaacgccctcatcgacaaggacggctggctgcacagcggcgacatcgcctactgggacgaggacgagcacttcttcatcgtcgaccggctgaagtcgctgatcaagtacaagggctaccaggtggcgccggccgagctggagagcatcctgctccagcaccccaacatcttcgacgccggcgtggccgggctgccggacgacgacgccggcgagctgccggccgcggtggtggtgctggagcacggcaagaccatgacggagaaggagatcgtcgactacgtggccagccaggtgaccaccgccaagaagctgcggggcggcgtggtgttcgtggacgaggtcccgaagggcctgaccgggaagctcgacgcccggaagatccgcgagatcctgatcaaggccaagaagggcggcaagatcgccgtgtaagactagtgcatcacatttaaaagcatctcagcctaccatgagaataagagaaagaaaatgaagatcaatagcttattcatctctttttctttttcgttggtgtaaagccaacaccctgtctaaaaaacataaatttctttaatcattttgcctcttttctctgtgcttcaattaataaaaaatggaaagaacctagatctaaaaaaaaaaaaaaaaaaaaaaaaaaaaaaaaaaaaaaaaaaaaaaaaaaaaaaaaaaaaaaaatgcatcccccccccccccccccccccccccccccccaaaggctcttttcagagccaccagaatt

SEQ ID NO: 1443 - DNA, 2027 bp, synthetic construct
  misc_feature 1..2027: note = mRPL21 PpLuc(GC) albumin7 A64 C30 histoneSL
  source 1..2027: mol_type = other DNA
ggggccgccgcagccatcttccagtaactcgccaaaaagcttgaggatggaggacgccaagaacatcaagaagggcccggcgcccttctacccgctggaggacgggaccgccggcgagcagctccacaaggccatgaagcggtacgccctggtgccgggcacgatcgccttcaccgacgcccacatcgaggtcgacatcacctacgcggagtacttcgagatgagcgtgcgcctggccgaggccatgaagcggtacggcctgaacaccaaccaccggatcgtggtgtgctcggagaacagcctgcagttcttcatgccggtgctgggcgccctcttcatcggcgtggccgtcgccccggcgaacgacatctacaacgagcgggagctgctgaacagcatggggatcagccagccgaccgtggtgttcgtgagcaagaagggcctgcagaagatcctgaacgtgcagaagaagctgcccatcatccagaagatcatcatcatggacagcaagaccgactaccagggcttccagtcgatgtacacgttcgtgaccagccacctcccgccgggcttcaacgagtacgacttcgtcccggagagcttcgaccgggacaagaccatcgccctgatcatgaacagcagcggcagcaccggcctgccgaagggggtggccctgccgcaccggaccgcctgcgtgcgcttctcgcacgcccgggaccccatcttcggcaaccagatcatcccggacaccgccatcctgagcgtggtgccgttccaccacggcttcggcatgttcacgaccctgggctacctcatctgcggcttccgggtggtcctgatgtaccggttcgaggaggagctgttcctgcggagcctgcaggactacaagatccagagcgcgctgctcgtgccgaccctgttcagcttcttcgccaagagcaccctgatcgacaagtacgacctgtcgaacctgcacgagatcgccagcgggggcgccccgctgagcaaggaggtgggcgaggccgtggccaagcggttccacctcccgggcatccgccagggctacggcctgaccgagaccacgagcgcgatcctgatcacccccgagggggacgacaagccgggcgccgtgggcaaggtggtcccgttcttcgaggccaaggtggtggacctggacaccggcaagaccctgggcgtgaaccagcggggcgagctgtgcgtgcgggggccgatgatcatgagcggctacgtgaacaacccggaggccaccaacgccctcatcgacaaggacggctggctgcacagcggcgacatcgcctactgggacgaggacgagcacttcttcatcgtcgaccggctgaagtcgctgatcaagtacaagggctaccaggtggcgccggccgagctggagagcatcctgctccagcaccccaacatcttcgacgccggcgtggccgggctgccggacgacgacgccggcgagctgccggccgcggtggtggtgctggagcacggcaagaccatgacggagaaggagatcgtcgactacgtggccagccaggtgaccaccgccaagaagctgcggggcggcgtggtgttcgtggacgaggtcccgaagggcctgaccgggaagctcgacgcccggaagatccgcgagatcctgatcaaggccaagaagggcggcaagatcgccgtgtaagactagtgcatcacatttaaaagcatctcagcctaccatgagaataagagaaagaaaatgaagatcaatagcttattcatctctttttctttttcgttggtgtaaagccaacaccctgtctaaaaaacataaatttctttaatcattttgcctcttttctctgtgcttcaattaataaaaaatggaaagaacctagatctaaaaaaaaaaaaaaaaaaaaaaaaaaaaaaaaaaaaaaaaaaaaaaaaaaaaaaaaaaaaaaaatgcatcccccccccccccccccccccccccccccccaaaggctcttttcagagccaccagaatt

SEQ ID NO: 1444 - DNA, 2046 bp, synthetic construct
  misc_feature 1..2046: note = mRPL35A PpLuc(GC) albumin7 A64 C30 histoneSL
  source 1..2046: mol_type = other DNA
gggccatcttggcgcctgtggaggcctgctgggaacaggacttctaacagcaagtaagcttgaggatggaggacgccaagaacatcaagaagggcccggcgcccttctacccgctggaggacgggaccgccggcgagcagctccacaaggccatgaagcggtacgccctggtgccgggcacgatcgccttcaccgacgcccacatcgaggtcgacatcacctacgcggagtacttcgagatgagcgtgcgcctggccgaggccatgaagcggtacggcctgaacaccaaccaccggatcgtggtgtgctcggagaacagcctgcagttcttcatgccggtgctgggcgccctcttcatcggcgtggccgtcgccccggcgaacgacatctacaacgagcgggagctgctgaacagcatggggatcagccagccgaccgtggtgttcgtgagcaagaagggcctgcagaagatcctgaacgtgcagaagaagctgcccatcatccagaagatcatcatcatggacagcaagaccgactaccagggcttccagtcgatgtacacgttcgtgaccagccacctcccgccgggcttcaacgagtacgacttcgtcccggagagcttcgaccgggacaagaccatcgccctgatcatgaacagcagcggcagcaccggcctgccgaagggggtggccctgccgcaccggaccgcctgcgtgcgcttctcgcacgcccgggaccccatcttcggcaaccagatcatcccggacaccgccatcctgagcgtggtgccgttccaccacggcttcggcatgttcacgaccctgggctacctcatctgcggcttccgggtggtcctgatgtaccggttcgaggaggagctgttcctgcggagcctgcaggactacaagatccagagcgcgctgctcgtgccgaccctgttcagcttcttcgccaagagcaccctgatcgacaagtacgacctgtcgaacctgcacgagatcgccagcgggggcgccccgctgagcaaggaggtgggcgaggccgtggccaagcggttccacctcccgggcatccgccagggctacggcctgaccgagaccacgagcgcgatcctgatcacccccgagggggacgacaagccgggcgccgtgggcaaggtggtcccgttcttcgaggccaaggtggtggacctggacaccggcaagaccctgggcgtgaaccagcggggcgagctgtgcgtgcgggggccgatgatcatgagcggctacgtgaacaacccggaggccaccaacgccctcatcgacaaggacggctggctgcacagcggcgacatcgcctactgggacgaggacgagcacttcttcatcgtcgaccggctgaagtcgctgatcaagtacaagggctaccaggtggcgccggccgagctggagagcatcctgctccagcaccccaacatcttcgacgccggcgtggccgggctgccggacgacgacgccggcgagctgccggccgcggtggtggtgctggagcacggcaagaccatgacggagaaggagatcgtcgactacgtggccagccaggtgaccaccgccaagaagctgcggggcggcgtggtgttcgtggacgaggtcccgaagggcctgaccgggaagctcgacgcccggaagatccgcgagatcctgatcaaggccaagaagggcggcaagatcgccgtgtaagactagtgcatcacatttaaaagcatctcagcctaccatgagaataagagaaagaaaatgaagatcaatagcttattcatctctttttctttttcgttggtgtaaagccaacaccctgtctaaaaaacataaatttctttaatcattttgcctcttttctctgtgcttcaattaataaaaaatggaaagaacctagatctaaaaaaaaaaaaaaaaaaaaaaaaaaaaaaaaaaaaaaaaaaaaaaaaaaaaaaaaaaaaaaaatgcatcccccccccccccccccccccccccccccccaaaggctcttttcagagccaccagaatt

SEQ ID NO: 1445 - DNA, 1840 bp, synthetic construct
  misc_feature 1..1840: note = RPL35 PpLuc(GC) A64 C30 histoneSL
  source 1..1840: mol_type = other DNA
ggggagcgggcggcggcgttggcggcttgtgcagcaaagcttgaggatggaggacgccaagaacatcaagaagggcccggcgcccttctacccgctggaggacgggaccgccggcgagcagctccacaaggccatgaagcggtacgccctggtgccgggcacgatcgccttcaccgacgcccacatcgaggtcgacatcacctacgcggagtacttcgagatgagcgtgcgcctggccgaggccatgaagcggtacggcctgaacaccaaccaccggatcgtggtgtgctcggagaacagcctgcagttcttcatgccggtgctgggcgccctcttcatcggcgtggccgtcgccccggcgaacgacatctacaacgagcgggagctgctgaacagcatggggatcagccagccgaccgtggtgttcgtgagcaagaagggcctgcagaagatcctgaacgtgcagaagaagctgcccatcatccagaagatcatcatcatggacagcaagaccgactaccagggcttccagtcgatgtacacgttcgtgaccagccacctcccgccgggcttcaacgagtacgacttcgtcccggagagcttcgaccgggacaagaccatcgccctgatcatgaacagcagcggcagcaccggcctgccgaagggggtggccctgccgcaccggaccgcctgcgtgcgcttctcgcacgcccgggaccccatcttcggcaaccagatcatcccggacaccgccatcctgagcgtggtgccgttccaccacggcttcggcatgttcacgaccctgggctacctcatctgcggcttccgggtggtcctgatgtaccggttcgaggaggagctgttcctgcggagcctgcaggactacaagatccagagcgcgctgctcgtgccgaccctgttcagcttcttcgccaagagcaccctgatcgacaagtacgacctgtcgaacctgcacgagatcgccagcgggggcgccccgctgagcaaggaggtgggcgaggccgtggccaagcggttccacctcccgggcatccgccagggctacggcctgaccgagaccacgagcgcgatcctgatcacccccgagggggacgacaagccgggcgccgtgggcaaggtggtcccgttcttcgaggccaaggtggtggacctggacaccggcaagaccctgggcgtgaaccagcggggcgagctgtgcgtgcgggggccgatgatcatgagcggctacgtgaacaacccggaggccaccaacgccctcatcgacaaggacggctggctgcacagcggcgacatcgcctactgggacgaggacgagcacttcttcatcgtcgaccggctgaagtcgctgatcaagtacaagggctaccaggtggcgccggccgagctggagagcatcctgctccagcaccccaacatcttcgacgccggcgtggccgggctgccggacgacgacgccggcgagctgccggccgcggtggtggtgctggagcacggcaagaccatgacggagaaggagatcgtcgactacgtggccagccaggtgaccaccgccaagaagctgcggggcggcgtggtgttcgtggacgaggtcccgaagggcctgaccgggaagctcgacgcccggaagatccgcgagatcctgatcaaggccaagaagggcggcaagatcgccgtgtaagactagtagatctaaaaaaaaaaaaaaaaaaaaaaaaaaaaaaaaaaaaaaaaaaaaaaaaaaaaaaaaaaaaaaaatgcatcccccccccccccccccccccccccccccccaaaggctcttttcagagccaccagaatt

SEQ ID NO: 1446 - DNA, 1840 bp, synthetic construct
  misc_feature 1..1840: note = RPL21 PpLuc(GC) A64 C30 histoneSL
  source 1..1840: mol_type = other DNA
ggggccggaaccgccatcttccagtaattcgccaaaaagcttgaggatggaggacgccaagaacatcaagaagggcccggcgcccttctacccgctggaggacgggaccgccggcgagcagctccacaaggccatgaagcggtacgccctggtgccgggcacgatcgccttcaccgacgcccacatcgaggtcgacatcacctacgcggagtacttcgagatgagcgtgcgcctggccgaggccatgaagcggtacggcctgaacaccaaccaccggatcgtggtgtgctcggagaacagcctgcagttcttcatgccggtgctgggcgccctcttcatcggcgtggccgtcgccccggcgaacgacatctacaacgagcgggagctgctgaacagcatggggatcagccagccgaccgtggtgttcgtgagcaagaagggcctgcagaagatcctgaacgtgcagaagaagctgcccatcatccagaagatcatcatcatggacagcaagaccgactaccagggcttccagtcgatgtacacgttcgtgaccagccacctcccgccgggcttcaacgagtacgacttcgtcccggagagcttcgaccgggacaagaccatcgccctgatcatgaacagcagcggcagcaccggcctgccgaagggggtggccctgccgcaccggaccgcctgcgtgcgcttctcgcacgcccgggaccccatcttcggcaaccagatcatcccggacaccgccatcctgagcgtggtgccgttccaccacggcttcggcatgttcacgaccctgggctacctcatctgcggcttccgggtggtcctgatgtaccggttcgaggaggagctgttcctgcggagcctgcaggactacaagatccagagcgcgctgctcgtgccgaccctgttcagcttcttcgccaagagcaccctgatcgacaagtacgacctgtcgaacctgcacgagatcgccagcgggggcgccccgctgagcaaggaggtgggcgaggccgtggccaagcggttccacctcccgggcatccgccagggctacggcctgaccgagaccacgagcgcgatcctgatcacccccgagggggacgacaagccgggcgccgtgggcaaggtggtcccgttcttcgaggccaaggtggtggacctggacaccggcaagaccctgggcgtgaaccagcggggcgagctgtgcgtgcgggggccgatgatcatgagcggctacgtgaacaacccggaggccaccaacgccctcatcgacaaggacggctggctgcacagcggcgacatcgcctactgggacgaggacgagcacttcttcatcgtcgaccggctgaagtcgctgatcaagtacaagggctaccaggtggcgccggccgagctggagagcatcctgctccagcaccccaacatcttcgacgccggcgtggccgggctgccggacgacgacgccggcgagctgccggccgcggtggtggtgctggagcacggcaagaccatgacggagaaggagatcgtcgactacgtggccagccaggtgaccaccgccaagaagctgcggggcggcgtggtgttcgtggacgaggtcccgaagggcctgaccgggaagctcgacgcccggaagatccgcgagatcctgatcaaggccaagaagggcggcaagatcgccgtgtaagactagtagatctaaaaaaaaaaaaaaaaaaaaaaaaaaaaaaaaaaaaaaaaaaaaaaaaaaaaaaaaaaaaaaaatgcatcccccccccccccccccccccccccccccccaaaggctcttttcagagccaccagaatt

SEQ ID NO: 1447 - DNA, 1881 bp, synthetic construct
  misc_feature 1..1881: note = ATP5A1 PpLuc(GC) A64 - C30 histoneSL
  source 1..1881: mol_type = other DNA
gggcggctcggccattttgtcccagtcagtccggaggctgcggctgcagaagtaccgcctgcggagtaactgcaaagaagcttgaggatggaggacgccaagaacatcaagaagggcccggcgcccttctacccgctggaggacgggaccgccggcgagcagctccacaaggccatgaagcggtacgccctggtgccgggcacgatcgccttcaccgacgcccacatcgaggtcgacatcacctacgcggagtacttcgagatgagcgtgcgcctggccgaggccatgaagcggtacggcctgaacaccaaccaccggatcgtggtgtgctcggagaacagcctgcagttcttcatgccggtgctgggcgccctcttcatcggcgtggccgtcgccccggcgaacgacatctacaacgagcgggagctgctgaacagcatggggatcagccagccgaccgtggtgttcgtgagcaagaagggcctgcagaagatcctgaacgtgcagaagaagctgcccatcatccagaagatcatcatcatggacagcaagaccgactaccagggcttccagtcgatgtacacgttcgtgaccagccacctcccgccgggcttcaacgagtacgacttcgtcccggagagcttcgaccgggacaagaccatcgccctgatcatgaacagcagcggcagcaccggcctgccgaagggggtggccctgccgcaccggaccgcctgcgtgcgcttctcgcacgcccgggaccccatcttcggcaaccagatcatcccggacaccgccatcctgagcgtggtgccgttccaccacggcttcggcatgttcacgaccctgggctacctcatctgcggcttccgggtggtcctgatgtaccggttcgaggaggagctgttcctgcggagcctgcaggactacaagatccagagcgcgctgctcgtgccgaccctgttcagcttcttcgccaagagcaccctgatcgacaagtacgacctgtcgaacctgcacgagatcgccagcgggggcgccccgctgagcaaggaggtgggcgaggccgtggccaagcggttccacctcccgggcatccgccagggctacggcctgaccgagaccacgagcgcgatcctgatcacccccgagggggacgacaagccgggcgccgtgggcaaggtggtcccgttcttcgaggccaaggtggtggacctggacaccggcaagaccctgggcgtgaaccagcggggcgagctgtgcgtgcgggggccgatgatcatgagcggctacgtgaacaacccggaggccaccaacgccctcatcgacaaggacggctggctgcacagcggcgacatcgcctactgggacgaggacgagcacttcttcatcgtcgaccggctgaagtcgctgatcaagtacaagggctaccaggtggcgccggccgagctggagagcatcctgctccagcaccccaacatcttcgacgccggcgtggccgggctgccggacgacgacgccggcgagctgccggccgcggtggtggtgctggagcacggcaagaccatgacggagaaggagatcgtcgactacgtggccagccaggtgaccaccgccaagaagctgcggggcggcgtggtgttcgtggacgaggtcccgaagggcctgaccgggaagctcgacgcccggaagatccgcgagatcctgatcaaggccaagaagggcggcaagatcgccgtgtaagactagtagatctaaaaaaaaaaaaaaaaaaaaaaaaaaaaaaaaaaaaaaaaaaaaaaaaaaaaaaaaaaaaaaaatgcatcccccccccccccccccccccccccccccccaaaggctcttttcagagccaccagaatt

SEQ ID NO: 1448 - DNA, 1868 bp, synthetic construct
  misc_feature 1..1868: note = HSD17B4 PpLuc(GC) A64 C30 histoneSL
  source 1..1868: mol_type = other DNA
gggtcccgcagtcggcgtccagcggctctgcttgttcgtgtgtgtgtcgttgcaggccttattcaagcttgaggatggaggacgccaagaacatcaagaagggcccggcgcccttctacccgctggaggacgggaccgccggcgagcagctccacaaggccatgaagcggtacgccctggtgccgggcacgatcgccttcaccgacgcccacatcgaggtcgacatcacctacgcggagtacttcgagatgagcgtgcgcctggccgaggccatgaagcggtacggcctgaacaccaaccaccggatcgtggtgtgctcggagaacagcctgcagttcttcatgccggtgctgggcgccctcttcatcggcgtggccgtcgccccggcgaacgacatctacaacgagcgggagctgctgaacagcatggggatcagccagccgaccgtggtgttcgtgagcaagaagggcctgcagaagatcctgaacgtgcagaagaagctgcccatcatccagaagatcatcatcatggacagcaagaccgactaccagggcttccagtcgatgtacacgttcgtgaccagccacctcccgccgggcttcaacgagtacgacttcgtcccggagagcttcgaccgggacaagaccatcgccctgatcatgaacagcagcggcagcaccggcctgccgaagggggtggccctgccgcaccggaccgcctgcgtgcgcttctcgcacgcccgggaccccatcttcggcaaccagatcatcccggacaccgccatcctgagcgtggtgccgttccaccacggcttcggcatgttcacgaccctgggctacctcatctgcggcttccgggtggtcctgatgtaccggttcgaggaggagctgttcctgcggagcctgcaggactacaagatccagagcgcgctgctcgtgccgaccctgttcagcttcttcgccaagagcaccctgatcgacaagtacgacctgtcgaacctgcacgagatcgccagcgggggcgccccgctgagcaaggaggtgggcgaggccgtggccaagcggttccacctcccgggcatccgccagggctacggcctgaccgagaccacgagcgcgatcctgatcacccccgagggggacgacaagccgggcgccgtgggcaaggtggtcccgttcttcgaggccaaggtggtggacctggacaccggcaagaccctgggcgtgaaccagcggggcgagctgtgcgtgcgggggccgatgatcatgagcggctacgtgaacaacccggaggccaccaacgccctcatcgacaaggacggctggctgcacagcggcgacatcgcctactgggacgaggacgagcacttcttcatcgtcgaccggctgaagtcgctgatcaagtacaagggctaccaggtggcgccggccgagctggagagcatcctgctccagcaccccaacatcttcgacgccggcgtggccgggctgccggacgacgacgccggcgagctgccggccgcggtggtggtgctggagcacggcaagaccatgacggagaaggagatcgtcgactacgtggccagccaggtgaccaccgccaagaagctgcggggcggcgtggtgttcgtggacgaggtcccgaagggcctgaccgggaagctcgacgcccggaagatccgcgagatcctgatcaaggccaagaagggcggcaagatcgccgtgtaagactagtagatctaaaaaaaaaaaaaaaaaaaaaaaaaaaaaaaaaaaaaaaaaaaaaaaaaaaaaaaaaaaaaaaatgcatcccccccccccccccccccccccccccccccaaaggctcttttcagagccaccagaatt

SEQ ID NO: 1449 - DNA, 1837 bp, synthetic construct
  misc_feature 1..1837: note = AIG1 PpLuc(GC) A64 C30 histoneSL
  source 1..1837: mol_type = other DNA
gggccgcccagccggtccaggcctctggcgaacaagcttgaggatggaggacgccaagaacatcaagaagggcccggcgcccttctacccgctggaggacgggaccgccggcgagcagctccacaaggccatgaagcggtacgccctggtgccgggcacgatcgccttcaccgacgcccacatcgaggtcgacatcacctacgcggagtacttcgagatgagcgtgcgcctggccgaggccatgaagcggtacggcctgaacaccaaccaccggatcgtggtgtgctcggagaacagcctgcagttcttcatgccggtgctgggcgccctcttcatcggcgtggccgtcgccccggcgaacgacatctacaacgagcgggagctgctgaacagcatggggatcagccagccgaccgtggtgttcgtgagcaagaagggcctgcagaagatcctgaacgtgcagaagaagctgcccatcatccagaagatcatcatcatggacagcaagaccgactaccagggcttccagtcgatgtacacgttcgtgaccagccacctcccgccgggcttcaacgagtacgacttcgtcccggagagcttcgaccgggacaagaccatcgccctgatcatgaacagcagcggcagcaccggcctgccgaagggggtggccctgccgcaccggaccgcctgcgtgcgcttctcgcacgcccgggaccccatcttcggcaaccagatcatcccggacaccgccatcctgagcgtggtgccgttccaccacggcttcggcatgttcacgaccctgggctacctcatctgcggcttccgggtggtcctgatgtaccggttcgaggaggagctgttcctgcggagcctgcaggactacaagatccagagcgcgctgctcgtgccgaccctgttcagcttcttcgccaagagcaccctgatcgacaagtacgacctgtcgaacctgcacgagatcgccagcgggggcgccccgctgagcaaggaggtgggcgaggccgtggccaagcggttccacctcccgggcatccgccagggctacggcctgaccgagaccacgagcgcgatcctgatcacccccgagggggacgacaagccgggcgccgtgggcaaggtggtcccgttcttcgaggccaaggtggtggacctggacaccggcaagaccctgggcgtgaaccagcggggcgagctgtgcgtgcgggggccgatgatcatgagcggctacgtgaacaacccggaggccaccaacgccctcatcgacaaggacggctggctgcacagcggcgacatcgcctactgggacgaggacgagcacttcttcatcgtcgaccggctgaagtcgctgatcaagtacaagggctaccaggtggcgccggccgagctggagagcatcctgctccagcaccccaacatcttcgacgccggcgtggccgggctgccggacgacgacgccggcgagctgccggccgcggtggtggtgctggagcacggcaagaccatgacggagaaggagatcgtcgactacgtggccagccaggtgaccaccgccaagaagctgcggggcggcgtggtgttcgtggacgaggtcccgaagggcctgaccgggaagctcgacgcccggaagatccgcgagatcctgatcaaggccaagaagggcggcaagatcgccgtgtaagactagtagatctaaaaaaaaaaaaaaaaaaaaaaaaaaaaaaaaaaaaaaaaaaaaaaaaaaaaaaaaaaaaaaaatgcatcccccccccccccccccccccccccccccccaaaggctcttttcagagccaccagaatt

SEQ ID NO: 1450 - DNA, 1862 bp, synthetic construct
  misc_feature 1..1862: note = COX6C PpLuc(GC) A64 C30 histoneSL
  source 1..1862: mol_type = other DNA
ggagtcaggaaggacgttggtgttgaggttagcatacgtatcaaggacagtaactaccaagcttgaggatggaggacgccaagaacatcaagaagggcccggcgcccttctacccgctggaggacgggaccgccggcgagcagctccacaaggccatgaagcggtacgccctggtgccgggcacgatcgccttcaccgacgcccacatcgaggtcgacatcacctacgcggagtacttcgagatgagcgtgcgcctggccgaggccatgaagcggtacggcctgaacaccaaccaccggatcgtggtgtgctcggagaacagcctgcagttcttcatgccggtgctgggcgccctcttcatcggcgtggccgtcgccccggcgaacgacatctacaacgagcgggagctgctgaacagcatggggatcagccagccgaccgtggtgttcgtgagcaagaagggcctgcagaagatcctgaacgtgcagaagaagctgcccatcatccagaagatcatcatcatggacagcaagaccgactaccagggcttccagtcgatgtacacgttcgtgaccagccacctcccgccgggcttcaacgagtacgacttcgtcccggagagcttcgaccgggacaagaccatcgccctgatcatgaacagcagcggcagcaccggcctgccgaagggggtggccctgccgcaccggaccgcctgcgtgcgcttctcgcacgcccgggaccccatcttcggcaaccagatcatcccggacaccgccatcctgagcgtggtgccgttccaccacggcttcggcatgttcacgaccctgggctacctcatctgcggcttccgggtggtcctgatgtaccggttcgaggaggagctgttcctgcggagcctgcaggactacaagatccagagcgcgctgctcgtgccgaccctgttcagcttcttcgccaagagcaccctgatcgacaagtacgacctgtcgaacctgcacgagatcgccagcgggggcgccccgctgagcaaggaggtgggcgaggccgtggccaagcggttccacctcccgggcatccgccagggctacggcctgaccgagaccacgagcgcgatcctgatcacccccgagggggacgacaagccgggcgccgtgggcaaggtggtcccgttcttcgaggccaaggtggtggacctggacaccggcaagaccctgggcgtgaaccagcggggcgagctgtgcgtgcgggggccgatgatcatgagcggctacgtgaacaacccggaggccaccaacgccctcatcgacaaggacggctggctgcacagcggcgacatcgcctactgggacgaggacgagcacttcttcatcgtcgaccggctgaagtcgctgatcaagtacaagggctaccaggtggcgccggccgagctggagagcatcctgctccagcaccccaacatcttcgacgccggcgtggccgggctgccggacgacgacgccggcgagctgccggccgcggtggtggtgctggagcacggcaagaccatgacggagaaggagatcgtcgactacgtggccagccaggtgaccaccgccaagaagctgcggggcggcgtggtgttcgtggacgaggtcccgaagggcctgaccgggaagctcgacgcccggaagatccgcgagatcctgatcaaggccaagaagggcggcaagatcgccgtgtaagactagtagatctaaaaaaaaaaaaaaaaaaaaaaaaaaaaaaaaaaaaaaaaaaaaaaaaaaaaaaaaaaaaaaaatgcatcccccccccccccccccccccccccccccccaaaggctcttttcagagccaccagaatt

SEQ ID NO: 1451 - DNA, 1848 bp, synthetic construct
  misc_feature 1..1848: note = ASAH1 PpLuc(GC) A64 C30 histoneSL
  source 1..1848: mol_type = other DNA
gggcctctgctggagtccggggagtggcgttggctgctagagcgaagcttgaggatggaggacgccaagaacatcaagaagggcccggcgcccttctacccgctggaggacgggaccgccggcgagcagctccacaaggccatgaagcggtacgccctggtgccgggcacgatcgccttcaccgacgcccacatcgaggtcgacatcacctacgcggagtacttcgagatgagcgtgcgcctggccgaggccatgaagcggtacggcctgaacaccaaccaccggatcgtggtgtgctcggagaacagcctgcagttcttcatgccggtgctgggcgccctcttcatcggcgtggccgtcgccccggcgaacgacatctacaacgagcgggagctgctgaacagcatggggatcagccagccgaccgtggtgttcgtgagcaagaagggcctgcagaagatcctgaacgtgcagaagaagctgcccatcatccagaagatcatcatcatggacagcaagaccgactaccagggcttccagtcgatgtacacgttcgtgaccagccacctcccgccgggcttcaacgagtacgacttcgtcccggagagcttcgaccgggacaagaccatcgccctgatcatgaacagcagcggcagcaccggcctgccgaagggggtggccctgccgcaccggaccgcctgcgtgcgcttctcgcacgcccgggaccccatcttcggcaaccagatcatcccggacaccgccatcctgagcgtggtgccgttccaccacggcttcggcatgttcacgaccctgggctacctcatctgcggcttccgggtggtcctgatgtaccggttcgaggaggagctgttcctgcggagcctgcaggactacaagatccagagcgcgctgctcgtgccgaccctgttcagcttcttcgccaagagcaccctgatcgacaagtacgacctgtcgaacctgcacgagatcgccagcgggggcgccccgctgagcaaggaggtgggcgaggccgtggccaagcggttccacctcccgggcatccgccagggctacggcctgaccgagaccacgagcgcgatcctgatcacccccgagggggacgacaagccgggcgccgtgggcaaggtggtcccgttcttcgaggccaaggtggtggacctggacaccggcaagaccctgggcgtgaaccagcggggcgagctgtgcgtgcgggggccgatgatcatgagcggctacgtgaacaacccggaggccaccaacgccctcatcgacaaggacggctggctgcacagcggcgacatcgcctactgggacgaggacgagcacttcttcatcgtcgaccggctgaagtcgctgatcaagtacaagggctaccaggtggcgccggccgagctggagagcatcctgctccagcaccccaacatcttcgacgccggcgtggccgggctgccggacgacgacgccggcgagctgccggccgcggtggtggtgctggagcacggcaagaccatgacggagaaggagatcgtcgactacgtggccagccaggtgaccaccgccaagaagctgcggggcggcgtggtgttcgtggacgaggtcccgaagggcctgaccgggaagctcgacgcccggaagatccgcgagatcctgatcaaggccaagaagggcggcaagatcgccgtgtaagactagtagatctaaaaaaaaaaaaaaaaaaaaaaaaaaaaaaaaaaaaaaaaaaaaaaaaaaaaaaaaaaaaaaaatgcatcccccccccccccccccccccccccccccccaaaggctcttttcagagccaccagaatt

SEQ ID NO: 1452 - DNA, 34 bp, Homo sapiens
  source 1..34: mol_type = other DNA
ggagcgggcggcggcgttggcggcttgtgcagca

SEQ ID NO: 1453 - DNA, 34 bp, Homo sapiens
  source 1..34: mol_type = other DNA
ggccggaaccgccatcttccagtaattcgccaaa

SEQ ID NO: 1454 - DNA, 75 bp, Homo sapiens
  source 1..75: mol_type = other DNA
gcggctcggccattttgtcccagtcagtccggaggctgcggctgcagaagtaccgcctgcggagtaactgcaaag

SEQ ID NO: 1455 - DNA, 62 bp, Homo sapiens
  source 1..62: mol_type = other DNA
gtcccgcagtcggcgtccagcggctctgcttgttcgtgtgtgtgtcgttgcaggccttattc

SEQ ID NO: 1456 - DNA, 31 bp, Homo sapiens
  source 1..31: mol_type = other DNA
gccgcccagccggtccaggcctctggcgaac

SEQ ID NO: 1457 - DNA, 56 bp, Homo sapiens
  source 1..56: mol_type = other DNA
agtcaggaaggacgttggtgttgaggttagcatacgtatcaaggacagtaactacc

SEQ ID NO: 1458 - DNA, 42 bp, Homo sapiens
  source 1..42: mol_type = other DNA
gcctctgctggagtccggggagtggcgttggctgctagagcg

SEQ ID NO: 1459 - DNA, 34 bp, Mus musculus
  source 1..34: mol_type = other DNA
ggccgccgcagccatcttccagtaactcgccaaa

SEQ ID NO: 1460 - DNA, 53 bp, Mus musculus
  source 1..53: mol_type = other DNA
gccatcttggcgcctgtggaggcctgctgggaacaggacttctaacagcaagt

SEQ ID NO: 1461 - DNA, 73 bp, Mus musculus
  source 1..73: mol_type = other DNA
tcctcctttcggccgccgcagccatcttccagtaactcgccaaaatgccatcttccagtaactcgccaaaatg

SEQ ID NO: 1462 - DNA, 68 bp, Mus musculus
  source 1..68: mol_type = other DNA
cttcctctttccgccatcttggcgcctgtggaggcctgctgggaacaggacttctaacagcaagtatg

SEQ ID NO: 1463 - DNA, 1850 bp, synthetic construct
  misc_feature 1..1850: note = RPL32 PpLuc(GC) ag -64
  source 1..1850: mol_type = other DNA
ggggcgctgcctacggaggtggcagccatctccttctcggcatcaagcttgaggatggaggacgccaagaacatcaagaagggcccggcgcccttctacccgctggaggacgggaccgccggcgagcagctccacaaggccatgaagcggtacgccctggtgccgggcacgatcgccttcaccgacgcccacatcgaggtcgacatcacctacgcggagtacttcgagatgagcgtgcgcctggccgaggccatgaagcggtacggcctgaacaccaaccaccggatcgtggtgtgctcggagaacagcctgcagttcttcatgccggtgctgggcgccctcttcatcggcgtggccgtcgccccggcgaacgacatctacaacgagcgggagctgctgaacagcatggggatcagccagccgaccgtggtgttcgtgagcaagaagggcctgcagaagatcctgaacgtgcagaagaagctgcccatcatccagaagatcatcatcatggacagcaagaccgactaccagggcttccagtcgatgtacacgttcgtgaccagccacctcccgccgggcttcaacgagtacgacttcgtcccggagagcttcgaccgggacaagaccatcgccctgatcatgaacagcagcggcagcaccggcctgccgaagggggtggccctgccgcaccggaccgcctgcgtgcgcttctcgcacgcccgggaccccatcttcggcaaccagatcatcccggacaccgccatcctgagcgtggtgccgttccaccacggcttcggcatgttcacgaccctgggctacctcatctgcggcttccgggtggtcctgatgtaccggttcgaggaggagctgttcctgcggagcctgcaggactacaagatccagagcgcgctgctcgtgccgaccctgttcagcttcttcgccaagagcaccctgatcgacaagtacgacctgtcgaacctgcacgagatcgccagcgggggcgccccgctgagcaaggaggtgggcgaggccgtggccaagcggttccacctcccgggcatccgccagggctacggcctgaccgagaccacgagcgcgatcctgatcacccccgagggggacgacaagccgggcgccgtgggcaaggtggtcccgttcttcgaggccaaggtggtggacctggacaccggcaagaccctgggcgtgaaccagcggggcgagctgtgcgtgcgggggccgatgatcatgagcggctacgtgaacaacccggaggccaccaacgccctcatcgacaaggacggctggctgcacagcggcgacatcgcctactgggacgaggacgagcacttcttcatcgtcgaccggctgaagtcgctgatcaagtacaagggctaccaggtggcgccggccgagctggagagcatcctgctccagcaccccaacatcttcgacgccggcgtggccgggctgccggacgacgacgccggcgagctgccggccgcggtggtggtgctggagcacggcaagaccatgacggagaaggagatcgtcgactacgtggccagccaggtgaccaccgccaagaagctgcggggcggcgtggtgttcgtggacgaggtcccgaagggcctgaccgggaagctcgacgcccggaagatccgcgagatcctgatcaaggccaagaagggcggcaagatcgccgtgtaagactagttataagactgactagcccgatgggcctcccaacgggccctcctcccctccttgcaccgagattaatagatctaaaaaaaaaaaaaaaaaaaaaaaaaaaaaaaaaaaaaaaaaaaaaaaaaaaaaaaaaaaaaaaa

SEQ ID NO: 1464 - DNA, 1873 bp, synthetic construct
  misc_feature 1..1873: note = PpLuc(GC) ag A64 histoneSL
  source 1..1873: mol_type = other DNA
ggggcgctgcctacggaggtggcagccatctccttctcggcatcaagcttgaggatggaggacgccaagaacatcaagaagggcccggcgcccttctacccgctggaggacgggaccgccggcgagcagctccacaaggccatgaagcggtacgccctggtgccgggcacgatcgccttcaccgacgcccacatcgaggtcgacatcacctacgcggagtacttcgagatgagcgtgcgcctggccgaggccatgaagcggtacggcctgaacaccaaccaccggatcgtggtgtgctcggagaacagcctgcagttcttcatgccggtgctgggcgccctcttcatcggcgtggccgtcgccccggcgaacgacatctacaacgagcgggagctgctgaacagcatggggatcagccagccgaccgtggtgttcgtgagcaagaagggcctgcagaagatcctgaacgtgcagaagaagctgcccatcatccagaagatcatcatcatggacagcaagaccgactaccagggcttccagtcgatgtacacgttcgtgaccagccacctcccgccgggcttcaacgagtacgacttcgtcccggagagcttcgaccgggacaagaccatcgccctgatcatgaacagcagcggcagcaccggcctgccgaagggggtggccctgccgcaccggaccgcctgcgtgcgcttctcgcacgcccgggaccccatcttcggcaaccagatcatcccggacaccgccatcctgagcgtggtgccgttccaccacggcttcggcatgttcacgaccctgggctacctcatctgcggcttccgggtggtcctgatgtaccggttcgaggaggagctgttcctgcggagcctgcaggactacaagatccagagcgcgctgctcgtgccgaccctgttcagcttcttcgccaagagcaccctgatcgacaagtacgacctgtcgaacctgcacgagatcgccagcgggggcgccccgctgagcaaggaggtgggcgaggccgtggccaagcggttccacctcccgggcatccgccagggctacggcctgaccgagaccacgagcgcgatcctgatcacccccgagggggacgacaagccgggcgccgtgggcaaggtggtcccgttcttcgaggccaaggtggtggacctggacaccggcaagaccctgggcgtgaaccagcggggcgagctgtgcgtgcgggggccgatgatcatgagcggctacgtgaacaacccggaggccaccaacgccctcatcgacaaggacggctggctgcacagcggcgacatcgcctactgggacgaggacgagcacttcttcatcgtcgaccggctgaagtcgctgatcaagtacaagggctaccaggtggcgccggccgagctggagagcatcctgctccagcaccccaacatcttcgacgccggcgtggccgggctgccggacgacgacgccggcgagctgccggccgcggtggtggtgctggagcacggcaagaccatgacggagaaggagatcgtcgactacgtggccagccaggtgaccaccgccaagaagctgcggggcggcgtggtgttcgtggacgaggtcccgaagggcctgaccgggaagctcgacgcccggaagatccgcgagatcctgatcaaggccaagaagggcggcaagatcgccgtgtaagactagttataagactgactagcccgatgggcctcccaacgggccctcctcccctccttgcaccgagattaataaaaaaaaaaaaaaaaaaaaaaaaaaaaaaaaaaaaaaaaaaaaaaaaaaaaaaaaaaaaaaaatgcatcaaaggctcttttcagagccacca

SEQ ID NO: 1465 - DNA, 2035 bp, synthetic construct; identical to SEQ ID NO: 1367
  misc_feature 1..2035: note = PpLuc(GC) albumin7 A64 C30 histoneSL
  source 1..2035: mol_type = other DNA

SEQ ID NO: 1466 - DNA, 1836 bp, synthetic construct
  misc_feature 1..1836: note = RPL35 PpLuc(GC) ag A64
  source 1..1836: mol_type = other DNA
ggggagcgggcggcggcgttggcggcttgtgcagcaaagcttgaggatggaggacgccaagaacatcaagaagggcccggcgcccttctacccgctggaggacgggaccgccggcgagcagctccacaaggccatgaagcggtacgccctggtgccgggcacgatcgccttcaccgacgcccacatcgaggtcgacatcacctacgcggagtacttcgagatgagcgtgcgcctggccgaggccatgaagcggtacggcctgaacaccaaccaccggatcgtggtgtgctcggagaacagcctgcagttcttcatgccggtgctgggcgccctcttcatcggcgtggccgtcgccccggcgaacgacatctacaacgagcgggagctgctgaacagcatggggatcagccagccgaccgtggtgttcgtgagcaagaagggcctgcagaagatcctgaacgtgcagaagaagctgcccatcatccagaagatcatcatcatggacagcaagaccgactaccagggcttccagtcgatgtacacgttcgtgaccagccacctcccgccgggcttcaacgagtacgacttcgtcccggagagcttcgaccgggacaagaccatcgccctgatcatgaacagcagcggcagcaccggcctgccgaagggggtggccctgccgcaccggaccgcctgcgtgcgcttctcgcacgcccgggaccccatcttcggcaaccagatcatcccggacaccgccatcctgagcgtggtgccgttccaccacggcttcggcatgttcacgaccctgggctacctcatctgcggcttccgggtggtcctgatgtaccggttcgaggaggagctgttcctgcggagcctgcaggactacaagatccagagcgcgctgctcgtgccgaccctgttcagcttcttcgccaagagcaccctgatcgacaagtacgacctgtcgaacctgcacgagatcgccagcgggggcgccccgctgagcaaggaggtgggcgaggccgtggccaagcggttccacctcccgggcatccgccagggctacggcctgaccgagaccacgagcgcgatcctgatcacccccgagggggacgacaagccgggcgccgtgggcaaggtggtcccgttcttcgaggccaaggtggtggacctggacaccggcaagaccctgggcgtgaaccagcggggcgagctgtgcgtgcgggggccgatgatcatgagcggctacgtgaacaacccggaggccaccaacgccctcatcgacaaggacggctggctgcacagcggcgacatcgcctactgggacgaggacgagcacttcttcatcgtcgaccggctgaagtcgctgatcaagtacaagggctaccaggtggcgccggccgagctggagagcatcctgctccagcaccccaacatcttcgacgccggcgtggccgggctgccggacgacgacgccggcgagctgccggccgcggtggtggtgctggagcacggcaagaccatgacggagaaggagatcgtcgactacgtggccagccaggtgaccaccgccaagaagctgcggggcggcgtggtgttcgtggacgaggtcccgaagggcctgaccgggaagctcgacgcccggaagatccgcgagatcctgatcaaggccaagaagggcggcaagatcgccgtgtaagactagttataagactgactagcccgatgggcctcccaacgggccctcctcccctccttgcaccgagattaataaaaaaaaaaaaaaaaaaaaaaaaaaaaaaaaaaaaaaaaaaaaaaaaaaaaaaaaaaaaaaaa

SEQ ID NO: 1467 - DNA, 1836 bp, synthetic construct
  misc_feature 1..1836: note = RPL21 PpLuc(GC) ag A64
  source 1..1836: mol_type = other DNA
ggggccggaaccgccatcttccagtaattcgccaaaaagcttgaggatggaggacgccaagaacatcaagaagggcccggcgcccttctacccgctggaggacgggaccgccggcgagcagctccacaaggccatgaagcggtacgccctggtgccgggcacgatcgccttcaccgacgcccacatcgaggtcgacatcacctacgcggagtacttcgagatgagcgtgcgcctggccgaggccatgaagcggtacggcctgaacaccaaccaccggatcgtggtgtgctcggagaacagcctgcagttcttcatgccggtgctgggcgccctcttcatcggcgtggccgtcgccccggcgaacgacatctacaacgagcgggagctgctgaacagcatggggatcagccagccgaccgtggtgttcgtgagcaagaagggcctgcagaagatcctgaacgtgcagaagaagctgcccatcatccagaagatcatcatcatggacagcaagaccgactaccagggcttccagtcgatgtacacgttcgtgaccagccacctcccgccgggcttcaacgagtacgacttcgtcccggagagcttcgaccgggacaagaccatcgccctgatcatgaacagcagcggcagcaccggcctgccgaagggggtggccctgccgcaccggaccgcctgcgtgcgcttctcgcacgcccgggaccccatcttcggcaaccagatcatcccggacaccgccatcctgagcgtggtgccgttccaccacggcttcggcatgttcacgaccctgggctacctcatctgcggcttccgggtggtcctgatgtaccggttcgaggaggagctgttcctgcggagcctgcaggactacaagatccagagcgcgctgctcgtgccgaccctgttcagcttcttcgccaagagcaccctgatcgacaagtacgacctgtcgaacctgcacgagatcgccagcgggggcgccccgctgagcaaggaggtgggcgaggccgtggccaagcggttccacctcccgggcatccgccagggctacggcctgaccgagaccacgagcgcgatcctgatcacccccgagggggacgacaagccgggcgccgtgggcaaggtggtcccgttcttcgaggccaaggtggtggacctggacaccggcaagaccctgggcgtgaaccagcggggcgagctgtgcgtgcgggggccgatgatcatgagcggctacgtgaacaacccggaggccaccaacgccctcatcgacaaggacggctggctgcacagcggcgacatcgcctactgggacgaggacgagcacttcttcatcgtcgaccggctgaagtcgctgatcaagtacaagggctaccaggtggcgccggccgagctggagagcatcctgctccagcaccccaacatcttcgacgccggcgtggccgggctgccggacgacgacgccggcgagctgccggccgcggtggtggtgctggagcacggcaagaccatgacggagaaggagatcgtcgactacgtggccagccaggtgaccaccgccaagaagctgcggggcggcgtggtgttcgtggacgaggtcccgaagggcctgaccgggaagctcgacgcccggaagatccgcgagatcctgatcaaggccaagaagggcggcaagatcgccgtgtaagactagttataagactgactagcccgatgggcctcccaacgggccctcctcccctccttgcaccgagattaataaaaaaaaaaaaaaaaaaaaaaaaaaaaaaaaaaaaaaaaaaaaaaaaaaaaaaaaaaaaaaaa

SEQ ID NO: 1468 - DNA, 1877 bp, synthetic construct
  misc_feature 1..1877: note = atp5a1 PpLuc(GC) -g A64
  source 1..1877: mol_type = other DNA
gggcggctcggccattttgtcccagtcagtccggaggctgcggctgcagaagtaccgcctgcggagtaactgcaaagaagcttgaggatggaggacgccaagaacatcaagaagggcccggcgcccttctacccgctggaggacgggaccgccggcgagcagctccacaaggccatgaagcggtacgccctggtgccgggcacgatcgccttcaccgacgcccacatcgaggtcgacatcacctacgcggagtacttcgagatgagcgtgcgcctggccgaggccatgaagcggtacggcctgaacaccaaccaccggatcgtggtgtgctcggagaacagcctgcagttcttcatgccggtgctgggcgccctcttcatcggcgtggccgtcgccccggcgaacgacatctacaacgagcgggagctgctgaacagcatggggatcagccagccgaccgtggtgttcgtgagcaagaagggcctgcagaagatcctgaacgtgcagaagaagctgcccatcatccagaagatcatcatcatggacagcaagaccgactaccagggcttccagtcgatgtacacgttcgtgaccagccacctcccgccgggcttcaacgagtacgacttcgtcccggagagcttcgaccgggacaagaccatcgccctgatcatgaacagcagcggcagcaccggcctgccgaagggggtggccctgccgcaccggaccgcctgcgtgcgcttctcgcacgcccgggaccccatcttcggcaaccagatcatcccggacaccgccatcctgagcgtggtgccgttccaccacggcttcggcatgttcacgaccctgggctacctcatctgcggcttccgggtggtcctgatgtaccggttcgaggaggagctgttcctgcggagcctgcaggactacaagatccagagcgcgctgctcgtgccgaccctgttcagcttcttcgccaagagcaccctgatcgacaagtacgacctgtcgaacctgcacgagatcgccagcgggggcgccccgctgagcaaggaggtgggcgaggccgtggccaagcggttccacctcccgggcatccgccagggctacggcctgaccgagaccacgagcgcgatcctgatcacccccgagggggacgacaagccgggcgccgtgggcaaggtggtcccgttcttcgaggccaaggtggtggacctggacaccggcaagaccctgggcgtgaaccagcggggcgagctgtgcgtgcgggggccgatgatcatgagcggctacgtgaacaacccggaggccaccaacgccctcatcgacaaggacggctggctgcacagcggcgacatcgcctactgggacgaggacgagcacttcttcatcgtcgaccggctgaagtcgctgatcaagtacaagggctaccaggtggcgccggccgagctggagagcatcctgctccagcaccccaacatcttcgacgccggcgtggccgggctgccggacgacgacgccggcgagctgccggccgcggtggtggtgctggagcacggcaagaccatgacggagaaggagatcgtcgactacgtggccagccaggtgaccaccgccaagaagctgcggggcggcgtggtgttcgtggacgaggtcccgaagggcctgaccgggaagctcgacgcccggaagatccgcgagatcctgatcaaggccaagaagggcggcaagatcgccgtgtaagactagttataagactgactagcccgatgggcctcccaacgggccctcctcccctccttgcaccgagattaataaaaaaaaaaaaaaaaaaaaaaaaaaaaaaaaaaaaaaaaaaaaaaaaaaaaaaaaaaaaaaaa

SEQ ID NO: 1469 - DNA, 1864 bp, synthetic construct
  misc_feature 1..1864: note = HSD17B4 PpLuc(GC) ag A64
  source 1..1864: mol_type = other DNA
gggtcccgcagtcggcgtccagcggctctgcttgttcgtgtgtgtgtcgttgcaggccttattcaagcttgaggatggaggacgccaagaacatcaagaagggcccggcgcccttctacccgctggaggacgggaccgccggcgagcagctccacaaggccatgaagcggtacgccctggtgccgggcacgatcgccttcaccgacgcccacatcgaggtcgacatcacctacgcggagtacttcgagatgagcgtgcgcctggccgaggccatgaagcggtacggcctgaacaccaaccaccggatcgtggtgtgctcggagaacagcctgcagttcttcatgccggtgctgggcgccctcttcatcggcgtggccgtcgccccggcgaacgacatctacaacgagcgggagctgctgaacagcatggggatcagccagccgaccgtggtgttcgtgagcaagaagggcctgcagaagatcctgaacgtgcagaagaagctgcccatcatccagaagatcatcatcatggacagcaagaccgactaccagggcttccagtcgatgtacacgttcgtgaccagccacctcccgccgggcttcaacgagtacgacttcgtcccggagagcttcgaccgggacaagaccatcgccctgatcatgaacagcagcggcagcaccggcctgccgaagggggtggccctgccgcaccggaccgcctgcgtgcgcttctcgcacgcccgggaccccatcttcggcaaccagatcatcccggacaccgccatcctgagcgtggtgccgttccaccacggcttcggcatgttcacgaccctgggctacctcatctgcggcttccgggtggtcctgatgtaccggttcgaggaggagctgttcctgcggagcctgcaggactacaagatccagagcgcgctgctcgtgccgaccctgttcagcttcttcgccaagagcaccctgatcgacaagtacgacctgtcgaacctgcacgagatcgccagcgggggcgccccgctgagcaaggaggtgggcgaggccgtggccaagcggttccacctcccgggcatccgccagggctacggcctgaccgagaccacgagcgcgatcctgatcacccccgagggggacgacaagccgggcgccgtgggcaaggtggtcccgttcttcgaggccaaggtggtggacctggacaccggcaagaccctgggcgtgaaccagcggggcgagctgtgcgtgcgggggccgatgatcatgagcggctacgtgaacaacccggaggccaccaacgccctcatcgacaaggacggctggctgcacagcggcgacatcgcctactgggacgaggacgagcacttcttcatcgtcgaccggctgaagtcgctgatcaagtacaagggctaccaggtggcgccggccgagctggagagcatcctgctccagcaccccaacatcttcgacgccggcgtggccgggctgccggacgacgacgccggcgagctgccggccgcggtggtggtgctggagcacggcaagaccatgacggagaaggagatcgtcgactacgtggccagccaggtgaccaccgccaagaagctgcggggcggcgtggtgttcgtggacgaggtcccgaagggcctgaccgggaagctcgacgcccggaagatccgcgagatcctgatcaaggccaagaagggcggcaagatcgccgtgtaagactagttataagactgactagcccgatgggcctcccaacgggccctcctcccctccttgcaccgagattaataaaaaaaaaaaaaaaaaaaaaaaaaaaaaaaaaaaaaaaaaaaaaaaaaaaaaaaaaaaaaaaa

SEQ ID NO: 1470 - DNA, 1833 bp, synthetic construct
  misc_feature 1..1833: note = AIG1 PpLuc(GC) ag A64
  source 1..1833: mol_type = other DNA
gggccgcccagccggtccaggcctctggcgaacaagcttgaggatggaggacgccaagaacatcaagaagggcccggcgcccttctacccgctggaggacgggaccgccggcgagcagctccacaaggccatgaagcggtacgccctggtgccgggcacgatcgccttcaccgacgcccacatcgaggtcgacatcacctacgcggagtacttcgagatgagcgtgcgcctggccgaggccatgaagcggtacggcctgaacaccaaccaccggatcgtggtgtgctcggagaacagcctgcagttcttcatgccggtgctgggcgccctcttcatcggcgtggccgtcgccccggcgaacgacatctacaacgagcgggagctgctgaacagcatggggatcagccagccgaccgtggtgttcgtgagcaagaagggcctgcagaagatcctgaacgtgcagaagaagctgcccatcatccagaagatcatcatcatggacagcaagaccgactaccagggcttccagtcgatgtacacgttcgtgaccagccacctcccgccgggcttcaacgagtacgacttcgtcccggagagcttcgaccgggacaagaccatcgccctgatcatgaacagcagcggcagcaccggcctgccgaagggggtggccctgccgcaccggaccgcctgcgtgcgcttctcgcacgcccgggaccccatcttcggcaaccagatcatcccggacaccgccatcctgagcgtggtgccgttccaccacggcttcggcatgttcacgaccctgggctacctcatctgcggcttccgggtggtcctgatgtaccggttcgaggaggagctgttcctgcggagcctgcaggactacaagatccagagcgcgctgctcgtgccgaccctgttcagcttcttcgccaagagcaccctgatcgacaagtacgacctgtcgaacctgcacgagatcgccagcgggggcgccccgctgagcaaggaggtgggcgaggccgtggccaagcggttccacctcccgggcatccgccagggctacggcctgaccgagaccacgagcgcgatcctgatcacccccgagggggacgacaagccgggcgccgtgggcaaggtggtcccgttcttcgaggccaaggtggtggacctggacaccggcaagaccctgggcgtgaaccagcggggcgagctgtgcgtgcgggggccgatgatcatgagcggctacgtgaacaacccggaggccaccaacgccctcatcgacaaggacggctggctgcacagcggcgacatcgcctactgggacgaggacgagcacttcttcatcgtcgaccggctgaagtcgctgatcaagtacaagggctaccaggtggcgccggccgagctggagagcatcctgctccagcaccccaacatcttcgacgccggcgtggccgggctgccggacgacgacgccggcgagctgccggccgcggtggtggtgctggagcacggcaagaccatgacggagaaggagatcgtcgactacgtggccagccaggtgaccaccgccaagaagctgcggggcggcgtggtgttcgtggacgaggtcccgaagggcctgaccgggaagctcgacgcccggaagatccgcgagatcctgatcaaggccaagaagggcggcaagatcgccgtgtaagactagttataagactgactagcccgatgggcctcccaacgggccctcctcccctccttgcaccgagattaataaaaaaaaaaaaaaaaaaaaaaaaaaaaaaaaaaaaaaaaaaaaaaaaaaaaaaaaaaaaaaaa

SEQ ID NO: 1471 - DNA, 1858 bp, synthetic construct
  misc_feature 1..1858: note = COX6C PpLuc(GC) ag -64
  source 1..1858: mol_type = other DNA
ggagtcaggaaggacgttggtgttgaggttagcatacgtatcaaggacagtaactaccaagcttgaggatggaggacgccaagaacatcaagaagggcccggcgcccttctacccgctggaggacgggaccgccggcgagcagctccacaaggccatgaagcggtacgccctggtgccgggcacgatcgccttcaccgacgcccacatcgaggtcgacatcacctacgcggagtacttcgagatgagcgtgcgcctggccgaggccatgaagcggtacggcctgaacaccaaccaccggatcgtggtgtgctcggagaacagcctgcagttcttcatgccggtgctgggcgccctcttcatcggcgtggccgtcgccccggcgaacgacatctacaacgagcgggagctgctgaacagcatggggatcagccagccgaccgtggtgttcgtgagcaagaagggcctgcagaagatcctgaacgtgcagaagaagctgcccatcatccagaagatcatcatcatggacagcaagaccgactaccagggcttccagtcgatgtacacgttcgtgaccagccacctcccgccgggcttcaacgagtacgacttcgtcccggagagcttcgaccgggacaagaccatcgccctgatcatgaacagcagcggcagcaccggcctgccgaagggggtggccctgccgcaccggaccgcctgcgtgcgcttctcgcacgcccgggaccccatcttcggcaaccagatcatcccggacaccgccatcctgagcgtggtgccgttccaccacggcttcggcatgttcacgaccctgggctacctcatctgcggcttccgggtggtcctgatgtaccggttcgaggaggagctgttcctgcggagcctgcaggactacaagatccagagcgcgctgctcgtgccgaccctgttcagcttcttcgccaagagcaccctgatcgacaagtacgacctgtcgaacctgcacgagatcgccagcgggggcgccccgctgagcaaggaggtgggcgaggccgtggccaagcggttccacctcccgggcatccgccagggctacggcctgaccgagaccacgagcgcgatcctgatcacccccgagggggacgacaagccgggcgccgtgggcaaggtggtcccgttcttcgaggccaaggtggtggacctggacaccggcaagaccctgggcgtgaaccagcggggcgagctgtgcgtgcgggggccgatgatcatgagcggctacgtgaacaacccggaggccaccaacgccctcatcgacaaggacggctggctgcacagcggcgacatcgcctactgggacgaggacgagcacttcttcatcgtcgaccggctgaagtcgctgatcaagtacaagggctaccaggtggcgccggccgagctggagagcatcctgctccagcaccccaacatcttcgacgccggcgtggccgggctgccggacgacgacgccggcgagctgccggccgcggtggtggtgctggagcacggcaagaccatgacggagaaggagatcgtcgactacgtggccagccaggtgaccaccgccaagaagctgcggggcggcgtggtgttcgtggacgaggtcccgaagggcctgaccgggaagctcgacgcccggaagatccgcgagatcctgatcaaggccaagaagggcggcaagatcgccgtgtaagactagttataagactgactagcccgatgggcctcccaacgggccctcctcccctccttgcaccgagattaataaaaaaaaaaaaaaaaaaaaaaaaaaaaaaaaaaaaaaaaaaaaaaaaaaaaaaaaaaaaaaaa

SEQ ID NO: 1472 - DNA, 1844 bp, synthetic construct
  misc_feature 1..1844: note = ASAH1 PpLuc(GC) ag A64
  source 1..1844: mol_type = other DNA
gggcctctgctggagtccggggagtggcgttggctgctagagcgaagcttgaggatggaggacgccaagaacatcaagaagggcccggcgcccttctacccgctggaggacgggaccgccggcgagcagctccacaaggccatgaagcggtacgccctggtgccgggcacgatcgccttcaccgacgcccacatcgaggtcgacatcacctacgcggagtacttcgagatgagcgtgcgcctggccgaggccatgaagcggtacggcctgaacaccaaccaccggatcgtggtgtgctcggagaacagcctgcagttcttcatgccggtgctgggcgccctcttcatcggcgtggccgtcgccccggcgaacgacatctacaacgagcgggagctgctgaacagcatggggatcagccagccgaccgtggtgttcgtgagcaagaagggcctgcagaagatcctgaacgtgcagaagaagctgcccatcatccagaagatcatcatcatggacagcaagaccgactaccagggcttccagtcgatgtacacgttcgtgaccagccacctcccgccgggcttcaacgagtacgacttcgtcccggagagcttcgaccgggacaagaccatcgccctgatcatgaacagcagcggcagcaccggcctgccgaagggggtggccctgccgcaccggaccgcctgcgtgcgcttctcgcacgcccgggaccccatcttcggcaaccagatcatcccggacaccgccatcctgagcgtggtgccgttccaccacggcttcggcatgttcacgaccctgggctacctcatctgcggcttccgggtggtcctgatgtaccggttcgaggaggagctgttcctgcggagcctgcaggactacaagatccagagcgcgctgctcgtgccgaccctgttcagcttcttcgccaagagcaccctgatcgacaagtacgacctgtcgaacctgcacgagatcgccagcgggggcgccccgctgagcaaggaggtgggcgaggccgtggccaagcggttccacctcccgggcatccgccagggctacggcctgaccgagaccacgagcgcgatcctgatcacccccgagggggacgacaagccgggcgccgtgggcaaggtggtcccgttcttcgaggccaaggtggtggacctggacaccggcaagaccctgggcgtgaaccagcggggcgagctgtgcgtgcgggggccgatgatcatgagcggctacgtgaacaacccggaggccaccaacgccctcatcgacaaggacggctggctgcacagcggcgacatcgcctactgggacgaggacgagcacttcttcatcgtcgaccggctgaagtcgctgatcaagtacaagggctaccaggtggcgccggccgagctggagagcatcctgctccagcaccccaacatcttcgacgccggcgtggccgggctgccggacgacgacgccggcgagctgccggccgcggtggtggtgctggagcacggcaagaccatgacggagaaggagatcgtcgactacgtggccagccaggtgaccaccgccaagaagctgcggggcggcgtggtgttcgtggacgaggtcccgaagggcctgaccgggaagctcgacgcccggaagatccgcgagatcctgatcaaggccaagaagggcggcaagatcgccgtgtaagactagttataagactgactagcccgatgggcctcccaacgggccctcctcccctccttgcaccgagattaataaaaaaaaaaaaaaaaaaaaaaaaaaaaaaaaaaaaaaaaaaaaaaaaaaaaaaaaaaaaaaaa

SEQ ID NO: 1473 - DNA, 1865 bp, synthetic construct
  misc_feature 1..1865: note = RPL35 PpLuc(GC) ag A64 histoneSL
  source 1..1865: mol_type = other DNA
ggggagcgggcggcggcgttggcggcttgtgcagcaaagcttgaggatggaggacgccaagaacatcaagaagggcccggcgcccttctacccgctggaggacgggaccgccggcgagcagctccacaaggccatgaagcggtacgccctggtgccgggcacgatcgccttcaccgacgcccacatcgaggtcgacatcacctacgcggagtacttcgagatgagcgtgcgcctggccgaggccatgaagcggtacggcctgaacaccaaccaccggatcgtggtgtgctcggagaacagcctgcagttcttcatgccggtgctgggcgccctcttcatcggcgtggccgtcgccccggcgaacgacatctacaacgagcgggagctgctgaacagcatggggatcagccagccgaccgtggtgttcgtgagcaagaagggcctgcagaagatcctgaacgtgcagaagaagctgcccatcatccagaagatcatcatcatggacagcaagaccgactaccagggcttccagtcgatgtacacgttcgtgaccagccacctcccgccgggcttcaacgagtacgacttcgtcccggagagcttcgaccgggacaagaccatcgccctgatcatgaacagcagcggcagcaccggcctgccgaagggggtggccctgccgcaccggaccgcctgcgtgcgcttctcgcacgcccgggaccccatcttcggcaaccagatcatcccggacaccgccatcctgagcgtggtgccgttccaccacggcttcggcatgttcacgaccctgggctacctcatctgcggcttccgggtggtcctgatgtaccggttcgaggaggagctgttcctgcggagcctgcaggactacaagatccagagcgcgctgctcgtgccgaccctgttcagcttcttcgccaagagcaccctgatcgacaagtacgacctgtcgaacctgcacgagatcgccagcgggggcgccccgctgagcaaggaggtgggcgaggccgtggccaagcggttccacctcccgggcatccgccagggctacggcctgaccgagaccacgagcgcgatcctgatcacccccgagggggacgacaagccgggcgccgtgggcaaggtggtcccgttcttcgaggccaaggtggtggacctggacaccggcaagaccctgggcgtgaaccagcggggcgagctgtgcgtgcgggggccgatgatcatgagcggctacgtgaacaacccggaggccaccaacgccctcatcgacaaggacggctggctgcacagcggcgacatcgcctactgggacgaggacgagcacttcttcatcgtcgaccggctgaagtcgctgatcaagtacaagggctaccaggtggcgccggccgagctggagagcatcctgctccagcaccccaacatcttcgacgccggcgtggccgggctgccggacgacgacgccggcgagctgccggccgcggtggtggtgctggagcacggcaagaccatgacggagaaggagatcgtcgactacgtggccagccaggtgaccaccgccaagaagctgcggggcggcgtggtgttcgtggacgaggtcccgaagggcctgaccgggaagctcgacgcccggaagatccgcgagatcctgatcaaggccaagaagggcggcaagatcgccgtgtaagactagttataagactgactagcccgatgggcctcccaacgggccctcctcccctccttgcaccgagattaataaaaaaaaaaaaaaaaaaaaaaaaaaaaaaaaaaaaaaaaaaaaaaaaaaaaaaaaaaaaaaaatgcatcaaaggctcttttcagagccacca

SEQ ID NO: 1474 - DNA, 1865 bp, synthetic construct
  misc_feature 1..1865: note = RPL21 PpLuc(GC) ag A64 histoneSL
  source 1..1865: mol_type = other DNA
ggggccggaaccgccatcttccagtaattcgccaaaaagcttgaggatggaggacgccaagaacatcaagaagggcccggcgcccttctacccgctggaggacgggaccgccggcgagcagctccacaaggccatgaagcggtacgccctggtgccgggcacgatcgccttcaccgacgcccacatcgaggtcgacatcacctacgcggagtacttcgagatgagcgtgcgcctggccgaggccatgaagcggtacggcctgaacaccaaccaccggatcgtggtgtgctcggagaacagcctgcagttcttcatgccggtgctgggcgccctcttcatcggcgtggccgtcgccccggcgaacgacatctacaacgagcgggagctgctgaacagcatggggatcagccagccgaccgtggtgttcgtgagcaagaagggcctgcagaagatcctgaacgtgcagaagaagctgcccatcatccagaagatcatcatcatggacagcaagaccgactaccagggcttccagtcgatgtacacgttcgtgaccagccacctcccgccgggcttcaacgagtacgacttcgtcccggagagcttcgaccgggacaagaccatcgccctgatcatgaacagcagcggcagcaccggcctgccgaagggggtggccctgccgcaccggaccgcctgcgtgcgcttctcgcacgcccgggaccccatcttcggcaaccagatcatcccggacaccgccatcctgagcgtggtgccgttccaccacggcttcggcatgttcacgaccctgggctacctcatctgcggcttccgggtggtcctgatgtaccggttcgaggaggagctgttcctgcggagcctgcaggactacaagatccagagcgcgctgctcgtgccgaccctgttcagcttcttcgccaagagcaccctgatcgacaagtacgacctgtcgaacctgcacgagatcgccagcgggggcgccccgctgagcaaggaggtgggcgaggccgtggccaagcggttccacctcccgggcatccgccagggctacggcctgaccgagaccacgagcgcgatcctgatcacccccgagggggacgacaagccgggcgccgtgggcaaggtggtcccgttcttcgaggccaaggtggtggacctggacaccggcaagaccctgggcgtgaaccagcggggcgagctgtgcgtgcgggggccgatgatcatgagcggctacgtgaacaacccggaggccaccaacgccctcatcgacaaggacggctggctgcacagcggcgacatcgcctactgggacgaggacgagcacttcttcatcgtcgaccggctgaagtcgctgatcaagtacaagggctaccaggtggcgccggccgagctggagagcatcctgctccagcaccccaacatcttcgacgccggcgtggccgggctgccggacgacgacgccggcgagctgccggccgcggtggtggtgctggagcacggcaagaccatgacggagaaggagatcgtcgactacgtggccagccaggtgaccaccgccaagaagctgcggggcggcgtggtgttcgtggacgaggtcccgaagggcctgaccgggaagctcgacgcccggaagatccgcgagatcctgatcaaggccaagaagggcggcaagatcgccgtgtaagactagttataagactgactagcccgatgggcctcccaacgggccctcctcccctccttgcaccgagattaataaaaaaaaaaaaaaaaaaaaaaaaaaaaaaaaaaaaaaaaaaaaaaaaaaaaaaaaaaaaaaaatgcatcaaaggctcttttcagagccacca

SEQ ID NO: 1475 - DNA, 1906 bp, synthetic construct
  misc_feature 1..1906: note = atp5a1 PpLuc(GC) ag A64 histoneSL
  source 1..1906: mol_type = other DNA
gggcggctcggccattttgtcccagtcagtccggaggctgcggctgcagaagtaccgcctgcggagtaactgcaaagaagcttgaggatggaggacgccaagaacatcaagaagggcccggcgcccttctacccgctggaggacgggaccgccggcgagcagctccacaaggccatgaagcggtacgccctggtgccgggcacgatcgccttcaccgacgcccacatcgaggtcgacatcacctacgcggagtacttcgagatgagcgtgcgcctggccgaggccatgaagcggtacggcctgaacaccaaccaccggatcgtggtgtgctcggagaacagcctgcagttcttcatgccggtgctgggcgccctcttcatcggcgtggccgtcgccccggcgaacgacatctacaacgagcgggagctgctgaacagcatggggatcagccagccgaccgtggtgttcgtgagcaagaagggcctgcagaagatcctgaacgtgcagaagaagctgcccatcatccagaagatcatcatcatggacagcaagaccgactaccagggcttccagtcgatgtacacgttcgtgaccagccacctcccgccgggcttcaacgagtacgacttcgtcccggagagcttcgaccgggacaagaccatcgccctgatcatgaacagcagcggcagcaccggcctgccgaagggggtggccctgccgcaccggaccgcctgcgtgcgcttctcgcacgcccgggaccccatcttcggcaaccagatcatcccggacaccgccatcctgagcgtggtgccgttccaccacggcttcggcatgttcacgaccctgggctacctcatctgcggcttccgggtggtcctgatgtaccggttcgaggaggagctgttcctgcggagcctgcaggactacaagatccagagcgcgctgctcgtgccgaccctgttcagcttcttcgccaagagcaccctgatcgacaagtacgacctgtcgaacctgcacgagatcgccagcgggggcgccccgctgagcaaggaggtgggcgaggccgtggccaagcggttccacctcccgggcatccgccagggctacggcctgaccgagaccacgagcgcgatcctgatcacccccgagggggacgacaagccgggcgccgtgggcaaggtggtcccgttcttcgaggccaaggtggtggacctggacaccggcaagaccctgggcgtgaaccagcggggcgagctgtgcgtgcgggggccgatgatcatgagcggctacgtgaacaacccggaggccaccaacgccctcatcgacaaggacggctggctgcacagcggcgacatcgcctactgggacgaggacgagcacttcttcatcgtcgaccggctgaagtcgctgatcaagtacaagggctaccaggtggcgccggccgagctggagagcatcctgctccagcaccccaacatcttcgacgccggcgtggccgggctgccggacgacgacgccggcgagctgccggccgcggtggtggtgctggagcacggcaagaccatgacggagaaggagatcgtcgactacgtggccagccaggtgaccaccgccaagaagctgcggggcggcgtggtgttcgtggacgaggtcccgaagggcctgaccgggaagctcgacgcccggaagatccgcgagatcctgatcaaggccaagaagggcggcaagatcgccgtgtaagactagttataagactgactagcccgatgggcctcccaacgggccctcctcccctccttgcaccgagattaataaaaaaaaaaaaaaaaaaaaaaaaaaaaaaaaaaaaaaaaaaaaaaaaaaaaaaaaaaaaaaaatgcatcaaaggctcttttcagagccacca

SEQ ID NO: 1476 - DNA, 1893 bp, synthetic construct
  misc_feature 1..1893: note = HSD17B4 PpLuc(GC) ag A64 histoneSL
  source 1..1893: mol_type = other DNA
gggtcccgcagtcggcgtccagcggctctgcttgttcgtgtgtgtgtcgttgcaggccttattcaagcttgaggatggaggacgccaagaacatcaagaagggcccggcgcccttctacccgctggaggacgggaccgccggcgagcagctccacaaggccatgaagcggtacgccctggtgccgggcacgatcgccttcaccgacgcccacatcgaggtcgacatcacctacgcggagtacttcgagatgagcgtgcgcctggccgaggccatgaagcggtacggcctgaacaccaaccaccggatcgtggtgtgctcggagaacagcctgcagttcttcatgccggtgctgggcgccctcttcatcggcgtggccgtcgccccggcgaacgacatctacaacgagcgggagctgctgaacagcatggggatcagccagccgaccgtggtgttcgtgagcaagaagggcctgcagaagatcctgaacgtgcagaagaagctgcccatcatccagaagatcatcatcatggacagcaagaccgactaccagggcttccagtcgatgtacacgttcgtgaccagccacctcccgccgggcttcaacgagtacgacttcgtcccggagagcttcgaccgggacaagaccatcgccctgatcatgaacagcagcggcagcaccggcctgccgaagggggtggccctgccgcaccggaccgcctgcgtgcgcttctcgcacgcccgggaccccatcttcggcaaccagatcatcccggacaccgccatcctgagcgtggtgccgttccaccacggcttcggcatgttcacgaccctgggctacctcatctgcggcttccgggtggtcctgatgtaccggttcgaggaggagctgttcctgcggagcctgcaggactacaagatccagagcgcgctgctcgtgccgaccctgttcagcttcttcgccaagagcaccctgatcgacaagtacgacctgtcgaacctgcacgagatcgccagcgggggcgccccgctgagcaaggaggtgggcgaggccgtggccaagcggttccacctcccgggcatccgccagggctacggcctgaccgagaccacgagcgcgatcctgatcacccccgagggggacgacaagccgggcgccgtgggcaaggtggtcccgttcttcgaggccaaggtggtggacctggacaccggcaagaccctgggcgtgaaccagcggggcgagctgtgcgtgcgggggccgatgatcatgagcggctacgtgaacaacccggaggccaccaacgccctcatcgacaaggacggctggctgcacagcggcgacatcgcctactgggacgaggacgagcacttcttcatcgtcgaccggctgaagtcgctgatcaagtacaagggctaccaggtggcgccggccgagctggagagcatcctgctccagcaccccaacatcttcgacgccggcgtggccgggctgccggacgacgacgccggcgagctgccggccgcggtggtggtgctggagcacggcaagaccatgacggagaaggagatcgtcgactacgtggccagccaggtgaccaccgccaagaagctgcggggcggcgtggtgttcgtggacgaggtcccgaagggcctgaccgggaagctcgacgcccggaagatccgcgagatcctgatcaaggccaagaagggcggcaagatcgccgtgtaagactagttataagactgactagcccgatgggcctcccaacgggccctcctcccctccttgcaccgagattaataaaaaaaaaaaaaaaaaaaaaaaaaaaaaaaaaaaaaaaaaaaaaaaaaaaaaaaaaaaaaaaatgcatcaaaggctcttttcagagccacca

SEQ ID NO: 1477 - DNA, 1862 bp, synthetic construct
  misc_feature 1..1862: note = AIG1 PpLuc(GC) ag A64 histoneSL
  source 1..1862: mol_type = other DNA
gggccgcccagccggtccaggcctctggcgaacaagcttgaggatggaggacgccaagaacatcaagaagggcccggcgcccttctacccgctggaggacgggaccgccggcgagcagctccacaaggccatgaagcggtacgccctggtgccgggcacgatcgccttcaccgacgcccacatcgaggtcgacatcacctacgcggagtacttcgagatgagcgtgcgcctggccgaggccatgaagcggtacggcctgaacaccaaccaccggatcgtggtgtgctcggagaacagcctgcagttcttcatgccggtgctgggcgccctcttcatcggcgtggccgtcgccccggcgaacgacatctacaacgagcgggagctgctgaacagcatggggatcagccagccgaccgtggtgttcgtgagcaagaagggcctgcagaagatcctgaacgtgcagaagaagctgcccatcatccagaagatcatcatcatggacagcaagaccgactaccagggcttccagtcgatgtacacgttcgtgaccagccacctcccgccgggcttcaacgagtacgacttcgtcccggagagcttcgaccgggacaagaccatcgccctgatcatgaacagcagcggcagcaccggcctgccgaagggggtggccctgccgcaccggaccgcctgcgtgcgcttctcgcacgcccgggaccccatcttcggcaaccagatcatcccggacaccgccatcctgagcgtggtgccgttccaccacggcttcggcatgttcacgaccctgggctacctcatctgcggcttccgggtggtcctgatgtaccggttcgaggaggagctgttcctgcggagcctgcaggactacaagatccagagcgcgctgctcgtgccgaccctgttcagcttcttcgccaagagcaccctgatcgacaagtacgacctgtcgaacctgcacgagatcgccagcgggggcgccccgctgagcaaggaggtgggcgaggccgtggccaagcggttccacctcccgggcatccgccagggctacggcctgaccgagaccacgagcgcgatcctgatcacccccgagggggacgacaagccgggcgccgtgggcaaggtggtcccgttcttcgaggccaaggtggtggacctggacaccggcaagaccctgggcgtgaaccagcggggcgagctgtgcgtgcgggggccgatgatcatgagcggctacgtgaacaacccggaggccaccaacgccctcatcgacaaggacggctggctgcacagcggcgacatcgcctactgggacgaggacgagcacttcttcatcgtcgaccggctgaagtcgctgatcaagtacaagggctaccaggtggcgccggccgagctggagagcatcctgctccagcaccccaacatcttcgacgccggcgtggccgggctgccggacgacgacgccggcgagctgccggccgcggtggtggtgctggagcacggcaagaccatgacggagaaggagatcgtcgactacgtggccagccaggtgaccaccgccaagaagctgcggggcggcgtggtgttcgtggacgaggtcccgaagggcctgaccgggaagctcgacgcccggaagatccgcgagatcctgatcaaggccaagaagggcggcaagatcgccgtgtaagactagttataagactgactagcccgatgggcctcccaacgggccctcctcccctccttgcaccgagattaataaaaaaaaaaaaaaaaaaaaaaaaaaaaaaaaaaaaaaaaaaaaaaaaaaaaaaaaaaaaaaaatgcatcaaaggctcttttcagagccacca

SEQ ID NO: 1478 - DNA, 1887 bp, synthetic construct
  misc_feature 1..1887: note = COX6C PpLuc(GC) ag A64 histoneSL
  source 1..1887: mol_type = other DNA
ggagtcaggaaggacgttggtgttgaggttagcatacgtatcaaggacagtaactaccaagcttgaggatggaggacgccaagaacatcaagaagggcccggcgcccttctacccgctggaggacgggaccgccggcgagcagctccacaaggccatgaagcggtacgccctggtgccgggcacgatcgccttcaccgacgcccacatcgaggtcgacatcacctacgcggagtacttcgagatgagcgtgcgcctggccgaggccatgaagcggtacggcctgaacaccaaccaccggatcgtggtgtgctcggagaacagcctgcagttcttcatgccggtgctgggcgccctcttcatcggcgtggccgtcgccccggcgaacgacatctacaacgagcgggagctgctgaacagcatggggatcagccagccgaccgtggtgttcgtgagcaagaagggcctgcagaagatcctgaacgtgcagaagaagctgcccatcatccagaagatcatcatcatggacagcaagaccgactaccagggcttccagtcgatgtacacgttcgtgaccagccacctcccgccgggcttcaacgagtacgacttcgtcccggagagcttcgaccgggacaagaccatcgccctgatcatgaacagcagcggcagcaccggcctgccgaagggggtggccctgccgcaccggaccgcctgcgtgcgcttctcgcacgcccgggaccccatcttcggcaaccagatcatcccggacaccgccatcctgagcgtggtgccgttccaccacggcttcggcatgttcacgaccctgggctacctcatctgcggcttccgggtggtcctgatgtaccggttcgaggaggagctgttcctgcggagcctgcaggactacaagatccagagcgcgctgctcgtgccgaccctgttcagcttcttcgccaagagcaccctgatcgacaagtacgacctgtcgaacctgcacgagatcgccagcgggggcgccccgctgagcaaggaggtgggcgaggccgtggccaagcggttccacctcccgggcatccgccagggctacggcctgaccgagaccacgagcgcgatcctgatcacccccgagggggacgacaagccgggcgccgtgggcaaggtggtcccgttcttcgaggccaaggtggtggacctggacaccggcaagaccctgggcgtgaaccagcggggcgagctgtgcgtgcgggggccgatgatcatgagcggctacgtgaacaacccggaggccaccaacgccctcatcgacaaggacggctggctgcacagcggcgacatcgcctactgggacgaggacgagcacttcttcatcgtcgaccggctgaagtcgctgatcaagtacaagggctaccaggtggcgccggccgagctggagagcatcctgctccagcaccccaacatcttcgacgccggcgtggccgggctgccggacgacgacgccggcgagctgccggccgcggtggtggtgctggagcacggcaagaccatgacggagaaggagatcgtcgactacgtggccagccaggtgaccaccgccaagaagctgcggggcggcgtggtgttcgtggacgaggtcccgaagggcctgaccgggaagctcgacgcccggaagatccgcgagatcctgatcaaggccaagaagggcggcaagatcgccgtgtaagactagttataagactgactagcccgatgggcctcccaacgggccctcctcccctccttgcaccgagattaataaaaaaaaaaaaaaaaaaaaaaaaaaaaaaaaaaaaaaaaaaaaaaaaaaaaaaaaaaaaaaaatgcatcaaaggctcttttcagagccacca

SEQ ID NO: 1479 - DNA, 1873 bp, synthetic construct
  misc_feature 1..1873: note = ASAH1 PpLuc(GC) ag A64 histoneSL
  source 1..1873: mol_type = other DNA
gggcctctgctggagtccggggagtggcgttggctgctagagcgaagcttgaggatggaggacgccaagaacatcaagaagggcccggcgcccttctacccgctggaggacgggaccgccggcgagcagctccacaaggccatgaagcggtacgccctggtgccgggcacgatcgccttcaccgacgcccacatcgaggtcgacatcacctacgcggagtacttcgagatgagcgtgcgcctggccgaggccatgaagcggtacggcctgaacaccaaccaccggatcgtggtgtgctcggagaacagcctgcagttcttcatgccggtgctgggcgccctcttcatcggcgtggccgtcgccccggcgaacgacatctacaacgagcgggagctgctgaacagcatggggatcagccagccgaccgtggtgttcgtgagcaagaagggcctgcagaagatcctgaacgtgcagaagaagctgcccatcatccagaagatcatcatcatggacagcaagaccgactaccagggcttccagtcgatgtacacgttcgtgaccagccacctcccgccgggcttcaacgagtacgacttcgtcccggagagcttcgaccgggacaagaccatcgccctgatcatgaacagcagcggcagcaccggcctgccgaagggggtggccctgccgcaccggaccgcctgcgtgcgcttctcgcacgcccgggaccccatcttcggcaaccagatcatcccggacaccgccatcctgagcgtggtgccgttccaccacggcttcggcatgttcacgaccctgggctacctcatctgcggcttccgggtggtcctgatgtaccggttcgaggaggagctgttcctgcggagcctgcaggactacaagatccagagcgcgctgctcgtgccgaccctgttcagcttcttcgccaagagcaccctgatcgacaagtacgacctgtcgaacctgcacgagatcgccagcgggggcgccccgctgagcaaggaggtgggcgaggccgtggccaagcggttccacctcccgggcatccgccagggctacggcctgaccgagaccacgagcgcgatcctgatcacccccgagggggacgacaagccgggcgccgtgggcaaggtggtcccgttcttcgaggccaaggtggtggacctggacaccggcaagaccctgggcgtgaaccagcggggcgagctgtgcgtgcgggggccgatgatcatgagcggctacgtgaacaacccggaggccaccaacgccctcatcgacaaggacggctggctgcacagcggcgacatcgcctactgggacgaggacgagcacttcttcatcgtcgaccggctgaagtcgctgatcaagtacaagggctaccaggtggcgccggccgagctggagagcatcctgctccagcaccccaacatcttcgacgccggcgtggccgggctgccggacgacgacgccggcgagctgccggccgcggtggtggtgctggagcacggcaagaccatgacggagaaggagatcgtcgactacgtggccagccaggtgaccaccgccaagaagctgcggggcggcgtggtgttcgtggacgaggtcccgaagggcctgaccgggaagctcgacgcccggaagatccgcgagatcctgatcaaggccaagaagggcggcaagatcgccgtgtaagactagttataagactgactagcccgatgggcctcccaacgggccctcctcccctccttgcaccgagattaataaaaaaaaaaaaaaaaaaaaaaaaaaaaaaaaaaaaaaaaaaaaaaaaaaaaaaaaaaaaaaaatgcatcaaaggctcttttcagagccacca

SEQ ID NO: 1480 - DNA, 1873 bp, synthetic construct; identical to SEQ ID NO: 1464
  misc_feature 1..1873: note = RPL32 PpLuc(GC) ag A64 histoneSL
  source 1..1873: mol_type = other DNA

SEQ ID NO: 1481 - DNA, 2035 bp, synthetic construct; identical to SEQ ID NO: 1367
  misc_feature 1..2035: note = RPL32 PpLuc(GC) albumin7 A64 C30 histoneSL
  source 1..2035: mol_type = other DNA
